(19) United States
(12) Patent Application Publication
(10) Pub. No.: US 2013/0117869 A1
(43) Pub. Date: May 9, 2013

(54) METHOD FOR THE GENERATION OF COMPACT TALE-NUCLEASES AND USES THEREOF

(71) Applicants: PHILIPPE DUCHATEAU, Gargan (FR); Julien Valton, Paris (FR); Claudia Bertonati, Paris (FR); Jean-Charles Epinat, Paris (FR); George H. Silva, Trevise (FR); Alexandre Juillerat, Paris (FR)

(72) Inventors: PHILIPPE DUCHATEAU, Gargan (FR); Julien Valton, Paris (FR); Claudia Bertonati, Paris (FR); Jean-Charles Epinat, Paris (FR); George H. Silva, Trevise (FR); Alexandre Juillerat, Paris (FR)

(73) Assignee: Cellectis S.A., Romainville Cedex (FR)

(21) Appl. No.: 13/440,940

(22) Filed: Apr. 5, 2012

Related U.S. Application Data
(60) Provisional application No. 61/472,065, filed on Apr. 5, 2011.
(60) Provisional application No. 61/496,454, filed on Jun. 13, 2011.
(60) Provisional application No. 61/499,043, filed on Jun. 20, 2011.
(60) Provisional application No. 61/499,047, filed on Jun. 20, 2011.
(60) Provisional application No. 61/533,098, filed on Sep. 9, 2011.
(60) Provisional application No. 61/533,123, filed on Sep. 9, 2011.
(60) Provisional application No. 61/579,544, filed on Dec. 22, 2011.

(51) Int. Cl. C12N 9/16

(52) U.S. Cl. CPC C12N 9/16
USPC 800/13; 435/91.53; 435/196; 435/320.1; 435/358; 800/298; 435/440; 435/419; 536/23.2; 424/94.6

(57) ABSTRACT

The present invention relates to a method for the generation of compact Transcription Activator-Like Effector Nucleases (TALENs) that can efficiently target and process double-stranded DNA. More specifically, the present invention concerns a method for the creation of TALENs that consist of a single TALE DNA binding domain fused to at least one catalytic domain such that the active entity is composed of a single polypeptide chain for simple and efficient vectorization and does not require dimerization to target a specific single double-stranded DNA target sequence of interest and process DNA nearby said DNA target sequence. The present invention also relates to compact TALENs, vectors, compositions and kits used to implement the method.

### FIELD OF THE INVENTION

[0001] The present invention relates to a method for the generation of compact Transcription Activator-Like Effector Nucleases (TALENs) that can efficiently target and process double-stranded DNA. More specifically, the present invention concerns a method for the creation of TALENs that consist of a single TALE DNA binding domain fused to at least one catalytic domain such that the active entity is composed of a single polypeptide chain for simple and efficient vectorization and does not require dimerization to target a specific single double-stranded DNA target sequence of interest and process DNA nearby said DNA target sequence. The present invention also relates to compact TALENs, vectors, compositions and kits used to implement the method.

### BACKGROUND OF THE INVENTION

[0002] Mammalian genomes constantly suffer from various types of damage, of which double-strand breaks (DSBs) are considered the most dangerous (Haber 2000). Repair of DSBs can occur through diverse mechanisms that can depend on cellular context. Repair via homologous recombination (HR) is able to restore the original sequence at the break. Because of its strict dependence on extensive sequence homology, this mechanism is suggested to be active mainly during the S and G2 phases of the cell cycle where the sister chromatids are in close proximity (Sonoda, Hochegger et al. 2006). Single-strand annealing (SSA) is another homology-dependent process that can repair DSBs between direct repeats and thereby promotes deletions (Paques and Haber 1999). Finally, non-homologous end joining (NHEJ) of DNA is a major pathway for the repair of DSBs that can function throughout the cell cycle and does not depend on homologous recombination (Moore and Haber 1996; Haber 2008). NHEJ seems to comprise at least two different components: (i) a pathway that consists mostly in the direct re-joining of DSB ends, and which depends on the XRCC4, Lig4 and Ku proteins, and; (ii) an alternative NHEJ pathway, which does not depend on XRCC4, Lig4 and Ku, and is especially error-prone, resulting mostly in deletions, with the junctions occurring between micro-homologies (Frank, Sekiguchi et al. 1998; Gao, Sun et al. 1998; Guirouilh-Barbat, Huck et al. 2004; Guirouilh-Barbat, Rass et al. 2007; Haber 2008; McVey and Lee 2008).

[0003] Homologous gene targeting (HGT), first described over 25 years ago (Hinnen, Hicks et al. 1978; Orr-Weaver, Szostak et al. 1981; Orr-Weaver, Szostak et al. 1983; Rothstein 1983), was one of the first methods for rational genome engineering and remains to this day a standard for the generation of engineered cells or knock-out mice (Capecchi 2001). An inherently low efficiency has nevertheless prevented it from being used as a routine protocol in most cell types and organisms. To address these issues, an extensive assortment of rational approaches has been proposed with the intent of achieving greater than 1% targeted modifications. Many groups have focused on enhancing the efficacy of HGT, with two major disciplines having become apparent: (i) so-called “matrix optimization” methods, essentially consisting of modifying the targeting vector structure to achieve maximal efficacy, and; (ii) methods involving additional effectors to stimulate HR, generally sequence-specific endonucleases. The field of matrix optimization has covered a wide range of techniques, with varying degrees of success (Russell and Hirata 1998; Inoue, Dong et al. 2001; Hirata, Chamberlain et al. 2002; Taubes 2002; Gruenert, Bruscia et al. 2003; Sangiuolo, Scaldaferri et al. 2008; Bedayat, Abdolmohamadi et al. 2010). Stimulation of HR via nucleases, on the other hand, has repeatedly proven efficient (Paques and Duchateau 2007; Carroll 2008).

[0004] For DSBs induced by biological reagents, e.g. meganucleases, ZFNs and TALENs (see below), which cleave DNA by hydrolysis of two phosphodiester bonds, the DNA can be rejoined in a seamless manner by simple re-ligation of the cohesive ends. Alternatively, deleterious insertions or deletions (indels) of various sizes can occur at the breaks, eventually resulting in gene inactivation (Liang, Han et al. 1998; Lloyd, Plaisier et al. 2005; Doyon, McCammon et al. 2008; Perez, Wang et al. 2008; Santiago, Chan et al. 2008; Kim, Lee et al. 2009; Yang, Djukanovic et al. 2009). The nature of this process, which does not rely on site-specific or homologous recombination, gives rise to a third targeted approach based on endonuclease-induced mutagenesis. This approach, as well as the related applications, may be simpler than those based on homologous recombination in that (a) one does not need to introduce a repair matrix, and; (b) efficacy will be less cell-type dependant (in contrast to HR, NHEJ is probably active throughout the cell cycle (Delacote and Lopez 2008). Targeted mutagenesis based on NEHJ has been used to trigger inactivation of single or even multiple genes in immortalized cell lines (Cost, Freyvert et al. 2010; Liu, Chan et al. 2010). In addition, this method opens new perspectives for organisms in which the classical HR-based gene knock-out methods have proven inefficient, or at least difficult to establish (Doyon, McCammon et al. 2008; Geurts, Cost et al. 2009; Shukla, Doyon et al. 2009; Yang, Djukanovic et al. 2009; Gao, Smith et al. 2010; Mashimo, Takizawa et al. 2010; Menoret, Iscache et al. 2010).

[0005] Over the last 15 years, the use of meganucleases to successfully induce gene targeting has been well documented, starting from straightforward experiments involving wild-type I-SceI to more refined work involving completely re-engineered enzymes (Stoddard, Scharenberg et al. 2007; Galetto, Duchateau et al. 2009; Marcaida, Munoz et al. 2010; Arnould, Delenda et al. 2011). Meganucleases, also called homing endonucleases (HEs), can be divided into five families based on sequence and structure motifs: LAGLIDADG, GIY-YIG, HNH, His-Cys box and PD-(D/E)XK (Stoddard 2005; Zhao, Bonocora et al. 2007). Structural data are available for at least one member of each family. The most well studied family is that of the LAGLIDADG proteins, with a considerable body of biochemical, genetic and structural work having established that these endonucleases could be used as molecular tools (Stoddard, Scharenberg et al. 2007; Arnould, Delenda et al. 2011). Member proteins are composed of domains that adopt a similar αββαββα fold, with the LAGLIDADG motif comprising the terminal region of the first helix and not only contributing to a bipartite catalytic center but also forming the core subunit/subunit interaction (Stoddard 2005). Two such α/β domains assemble to form the functional protein, with the β-strands in each creating a saddle-shaped DNA binding region. The spatial separation of the catalytic center with regions directly interacting with the DNA has allowed for specificity re-engineering (Seligman, Chisholm et al. 2002; Sussman, Chadsey et al. 2004; Arnould, Chames et al. 2006; Doyon, Pattanayak et al. 2006; Rosen, Morrison et al. 2006; Smith, Grizot et al. 2006; Arnould, Perez et al. 2007). In addition, whereas all known LAGLIDADG proteins analyzed to date act as “cleavases” to cut both strands of the target DNA, recent progress has been made in generating “mega-nickases” that cleave only one strand (Niu, Tenney et al. 2008; McConnell Smith, Takeuchi et al. 2009). Such enzymes can in principle provide similar levels of targeted induced HR with a minimization in the frequency of NHEJ.

[0006] Although numerous engineering efforts have focused on LAGLIDADG HEs, members from two other families, GIY-YIG and HNH, are of particular interest. Biochemical and structural studies have established that in both families, member proteins can adopt a bipartite fold with distinct functional domains: (1) a catalytic domain responsible mainly for DNA cleavage, and; (2) a DNA-binding domain to provide target specificity (Stoddard 2005; Marcaida, Munoz et al. 2010). The related GIY-YIG HEs I-TevI and I-BmoI have been exploited to demonstrate the interchangeability of the DNA-binding region for these enzymes (Liu, Derbyshire et al. 2006). Analysis of the I-BasI HE revealed that although the N-terminal catalytic domain belongs to the HNH family, the C-terminal DNA-binding region resembles the intron-encoded endonuclease repeat motif (IENR1) found in endonucleases of the GIY-YIG family (Landthaler and Shub 2003). The catalytic head of I-BasI has sequence similarity to those of the HNH HEs I-HmuI, I-HmuII and I-TwoI, all of which function as strand-specific nickases (Landthaler, Begley et al. 2002; Landthaler and Shub 2003; Landthaler, Lau et al. 2004; Shen, Landthaler et al. 2004; Landthaler, Shen et al. 2006).

[0007] Whereas the above families of proteins contain sequence-specific nucleases, the HNH motif has also been identified in nonspecific nucleases such the E. coli colicins (e.g. ColE9 and ColE7), EndA from S. pneumoniae, NucA from Anabaena and CAD (Midon, Schafer et al. 2011). As well as having the HNH motif, several of these nucleases contain the signature DRGH motif and share structural homology with core elements forming the ββα-Me-finger active site motif. Mutational studies of residues in the HNH/DRGH motifs have confirmed their role in nucleic acid cleavage activity (Ku, Liu et al. 2002; Doudeva, Huang et al. 2006; Eastberg, Eklund et al. 2007; Huang and Yuan 2007). Furthermore, the DNA binding affinity and sequence preference for ColE7 could be effectively altered (Wang, Wright et al. 2009). Such detailed studies illustrate the potential in re-engineering nonspecific nucleases for targeted purposes.

[0008] Zinc-finger nucleases (ZFNs), generated by fusing Zinc-finger-based DNA-binding domains to an independent catalytic domain via a flexible linker (Kim, Cha et al. 1996; Smith, Berg et al. 1999; Smith, Bibikova et al. 2000), represent another type of engineered nuclease commonly used to stimulate gene targeting. The archetypal ZFNs are based on the catalytic domain of the Type IIS restriction enzyme Fokl and have been successfully used to induce gene correction, gene insertion, and gene deletion. Zinc Finger-based DNA binding domains are made of strings of 3 or 4 individual Zinc Fingers, each recognizing a DNA triplet (Pabo, Peisach et al. 2001). In theory, one of the major advantages of ZFNs is that they are easy to design, using combinatorial assembly of preexisting Zinc Fingers with known recognition patterns (Choo and Klug 1994; Choo and Klug 1994; Kim, Lee et al. 2009). However, close examination of high resolution structures shows that there are actually cross-talks between units (Elrod-Erickson, Rould et al. 1996), and several methods have been used to assemble ZF proteins by choosing individual Zinc Fingers in a context dependant manner (Greisman and Pabo 1997; Isalan and Choo 2001; Maeder, Thibodeau-Beganny et al. 2008; Ramirez, Foley et al. 2008) to achieve better success rates and reagents of better quality.

[0009] Recently, a new class of chimeric nuclease using a FokI catalytic domain has been described (Christian, Cermak et al. 2010; Li, Huang et al. 2011). The DNA binding domain of these nucleases is derived from Transcription Activator Like Effectors (TALE), a family of proteins used in the infection process by plant pathogens of the Xanthomonas genus. In these DNA binding domains, sequence specificity is driven by a series of 33-35 amino acids repeats, differing essentially by two positions (Boch, Scholze et al. 2009; Moscou and Bogdanove 2009). Each base pair in the DNA target is contacted by a single repeat, with the specificity resulting from the two variant amino acids of the repeat (the so-called repeat variable dipeptide, RVD). The apparent modularity of these DNA binding domains has been confirmed to a certain extent by modular assembly of designed TALE-derived protein with new specificities (Boch, Scholze et al. 2009; Moscou and Bogdanove 2009). However, one cannot yet rule out a certain level of context dependence of individual repeat/base recognition patterns, as was observed for Zinc Finger proteins (see above). Furthermore, it has been shown that natural TAL effectors can dimerize (Gurlebeck, Szurek et al. 2005) and how this would affect a “dimerization-based” TALE-derived nuclease is currently unknown.

[0010] The functional layout of a FokI-based TALE-nuclease (TALEN) is essentially that of a ZFN, with the Zinc-finger DNA binding domain being replaced by the TALE domain (Christian, Cermak et al. 2010; Li, Huang et al. 2011). As such, DNA cleavage by a TALEN requires two DNA recognition regions flanking an unspecific central region. This central “spacer” DNA region is essential to promote catalysis by the dimerizing FokI catalytic domain, and extensive effort has been placed into optimizing the distance between the DNA binding sites (Christian, Cermak et al. 2010; Miller, Tan et al. 2011). The length of the spacer has been varied from 14 to 30 base pairs, with efficiency in DNA cleavage being interdependent with spacer length as well as TALE scaffold construction (i.e. the nature of the fusion construct used). It is still unknown whether differences in the repeat region (i.e. RVD type and number used) have an impact on the DNA “spacer” requirements or on the efficiency of DNA cleavage by TALENs. Nevertheless, TALE-nucleases have been shown to be active to various extents in cell-based assays in yeast, mammalian cells and plants (Christian, Cermak et al. 2010; Li, Huang et al. 2011; Mahfouz, Li et al. 2011; Miller, Tan et al. 2011).

[0011] The inventors have developed a new type of TALEN that can be engineered to specifically recognize and process target DNA efficiently. These novel “compact TALENs” (cTALENs) do not require dimerization for DNA processing activity, thereby alleviating the need for “dual” target sites with intervening DNA “spacers”. Furthermore, the invention allows for generating several distinct types of enzymes that can enhance separate DNA repair pathways (HR vs. NHEJ).

### BRIEF SUMMARY OF THE INVENTION

[0012] The present invention relates to a method to generate compact Transcription Activator-Like Effector Nucleases (TALENs) composed of a single polypeptide chain that do not require dimerization to target a specific single double-stranded DNA target sequence of interest and process DNA nearby said single double-stranded DNA target sequence of interest. The present invention also concerns the creation of functional single polypeptide fusion proteins for simple and efficient vectorization. In another aspect, the present invention relates to compact TALENs comprising at least an enhancer domain wherein said enhancer domain enhances the DNA processing efficiency of said compact TALENS nearby a single double-stranded DNA target sequence of interest. The present invention also relates to compact TALENS, vectors, compositions and kits used to implement the method. The present invention also relates to methods for use of said compact TALENs according to the invention for various applications ranging from targeted DNA cleavage to targeted gene regulation. The methods according to the present invention can be used in various fields ranging from the creation of transgenic organisms to treatment of genetic diseases.

### BRIEF DESCRIPTION OF THE FIGURES

[0013] In addition to the preceding features, the invention further comprises other features which will emerge from the description which follows, as well as to the appended drawings. A more complete appreciation of the invention and many of the attendant advantages thereof will be readily obtained as the same becomes better understood by reference to the following Figures in conjunction with the detailed description below.

[0014] FIG. 1: Endonuclease-induced gene targeting approaches. Upon cleavage, DNA repair mechanisms may result in one of several outcomes. (A) When a double-strand break is targeted between two direct repeats, HR can result in the deletion of one repeat together with the intervening sequence. Gene insertion (B) or correction (C) can be achieved by the introduction of a DNA repair matrix containing sequences homologous to the endogenous sequence surrounding the DNA break. Mutations can be corrected either at or distal to the break, with the frequency of correction decreasing with increasing distance. (D) The misrepair of DNA ends by error-prone NHEJ can result in insertions or deletions of various sizes, leading to gene inactivation.

[0015] FIG. 2: Sequences of target DNA recognized by I-CreI and I-TevI. C1234 (SEQ ID NO: 3) represents the partially symmetric natural DNA sequence recognized and cleaved by the wild-type I-CreI meganuclease. C1221 (SEQ ID NO: 2) represents an artificial palindromic DNA sequence, derived from C1234 (SEQ ID NO: 3), also recognized and cleaved by I-CreI (SEQ ID NO: 1). Nucleotides are numbered outward (−/+) from the center of the target. DNA cleavage occurs on either side of the underlined sequence to generate 4-nucleotide 3′ overhanging ends. For I-CreI-based meganucleases, the nature of the nucleotides at positions −2 to +2 can potentially interfere with the cleavage activity of the protein. Tev (SEQ ID NO: 105) represents the asymmetric DNA sequence recognized and cleaved by the wild-type I-TevI meganuclease. Nucleotide numbering is relative to the intron-insertion site of the natural target sequence. Cleavage by I-TevI occurs on either side of the underlined sequence to generate 2-nucleotide 3′ overhanging ends.

[0016] FIG. 3: Sequences of the target DNAs recognized by TALEN and compact TALEN constructs. Target DNAs for the engineered compact TALENS cTN-Avr and cTN-Pth are based on the naturally occurring asymmetric sequences AvrBs3 (19 bp) [in bT1-Avr (SEQ ID NO: 136) and bT2-Avr (SEQ ID NO: 137) baseline protein scaffolds] and PthXo1 (25 bp) [in bT1-Pth (SEQ ID NO: 138) and bT2-Pth (SEQ ID NO: 139) baseline protein scaffolds], respectively. For each sequence, nucleotides are numbered outward (−/+) from the anchoring T (position −1). Sequences shown are directly contacted by the protein to provide target specificity. Wild-type Repeat Variable Dipeptides (RVDs) correspond to the dipeptides found in the repeats of the naturally occurring effector proteins targeted to each sequence. Cipher RVDs are based on the subset of dipeptide/nucleotide pairs listed. Artificial RVDs are derived by direct readout of the underlying DNA sequence using the cipher RVD code (SEQ ID NO: 245 to 249).

[0017] FIG. 4: Schematic of meganuclease fusion configurations. Fusion constructs are optimized to address or overcome distinct problems. (A) The addition of two catalytic domains to an active meganuclease can not only enhance cleavage activity (e.g. three chances to effect DNA cleavage per binding event) but can also promote sequence alterations by error-prone NHEJ since small sections of DNA are excised for each pair of cleavage events. (B) When specificity reengineering precludes maintaining cleavage activity of the meganuclease, the attached catalytic domains provide the necessary strand cleavage function. (C) and (D) represent instances of (A) and (B), respectively, when only one catalytic domain is tolerated per fusion protein (e.g. either as an N- or C-terminal fusion or in the context of a single-chain molecule). In all cases, the catalytic domain envisioned can be either a cleavase (ability to cleave both strands of the DNA) or a nickase (cleavage of only a single DNA strand) depending on the application. Fusion junctions (N- vs. C-terminal) and linker designs can vary with the application. Components of the fusion proteins are listed in the legend.

[0018] FIG. 5: Schematic of cTALEN configurations. Compact TALENs are designed to alleviate the need for multiple independent protein moieties when targeting a DNA cleavage event. Importantly, the requisite “spacer” region and dual target sites essential for the function of current classical TALENs are unnecessary. In addition, since the catalytic domain does not require specific DNA contacts, there are no restrictions on regions surrounding the core TALE DNA binding domain. (A) N-terminal fusion construct to promote HR via a standard (cleavase domain) or conservative (nickase domain) repair pathway. (B) C-terminal fusion construct with properties as in (A). (C) The attachment of two catalytic domains to both ends of the TALE allows for dual cleavage with enhancement in NHEJ. Fusion junctions (N-vs. C-terminal) and linker designs can vary with the application. Components of the fusion proteins are listed in the legend.

[0019] FIG. 6: Schematic of enhanced cTALEN configurations. Compact TALENs can be enhanced through the addition of a domain to promote existing or alternate activities. As each end of the TALE DNA binding domain is amenable to fusion, the order (N- v.s C-terminal) of addition of the catalytic and enhancer domains can vary with the application. (A) A standard cTALEN with a C-terminal enhancer domain. (B) The enhancer domain is fused to the cTALEN via the N-terminus of the catalytic domain. Such a configuration can be used to assist and/or anchor the catalytic domain near the DNA to increase cleavage activity. (C) The enhancer domain is sandwiched between the catalytic domain and TALE DNA binding domain. The enhancer domain can promote communication between the flanking domains (i.e. to assist in catalysis and/or DNA binding) or can be used to overcome the requisite T nucleotide at position −1 of all TALE-based targets. (D) The enhancer domain is used to functionally replace the natural TALE protein N-terminal region. (E) The enhancer domain is used to functionally replace the natural TALE protein C-terminal region. Fusion junctions (N-vs. C-terminal) and linker designs can vary with the application. Components of the fusion proteins are listed in the legend.

[0020] FIG. 7: Schematic of trans cTALEN configurations. Compact TALENs can be combined with auxiliary enhancer domains to promote alternate activities. Auxiliary domains provide an additional function that is not essential to the cTALEN activity. (A) A standard cTALEN with an N-terminal nickase catalytic domain becomes a “cleavase” via the separate addition of the auxiliary domain. (B) In some instances, the need to target the specificity of the auxiliary domain is necessary. Such a configuration can achieved via a TALE fusion and can be used to assist and/or anchor the auxiliary domain near the DNA to increase activity of the cTALEN. (C) The targeted auxiliary domain is provided either before or after the cTALEN to perform an independent task. Communication between the fusion proteins is not necessary. Fusion junctions (N-vs. C-terminal) and linker designs can vary with the application. Components of the fusion proteins are listed in the legend.

[0021] FIG. 8: Schematic of DNA cleavage, in vivo re-ligation and other repair pathways. In cells, cleavage by peptidic rare-cutting endonucleases usually results in a DNA double strand break (DSB) with cohesive ends. For example, meganucleases from the LAGLIDADG family, such as I-SceI and I-CreI, produce DSBs with 3′ overhangs. These cohesive ends can be re-ligated in vivo by NHEJ, resulting in seamless repair, and in the restoration of a cleavable target sequence, which can in turn be processed again by the same endonuclease. Thus, a series of futile cycles of cleavage and re-ligation events can take place. Imprecise NHEJ or homologous recombination can alter or remove the cleavage site, resulting in cycle exit; this can also apply to compact TALENs and enhanced compact TALENs according to the present invention (A). Two other ways can also stop the process: (i) Chromosome loss can occur as the consequence of failure to repair the DSB; (ii) a loss of nuclease (degradation, dilution, cell division, etc. . . . ). B-E: Consequences of cleavage of additional phosphodiester bonds. The addition of a single nickase activity (B) or of two nickase activities affecting the same strand (C) would result in a single strand gap, and suppress the cohesive ends, which could in turn affect the spectrum of events. Addition of two nickase activities affecting opposite strands (D) or of a new cleavase activity generating a second DSB (E) would result in a double strand gap; as a consequence, perfect re-ligation is no longer possible, and one or several alternative repair outcomes could be stimulated. The current figure makes no assumption regarding the relative frequencies of these alternative outcomes (imprecise NHEJ, homologous recombination, others . . . ). Solid triangles represent hydrolysis of phosphodiester bonds.

[0022] FIG. 9: Activity of TALE-AvrBs3::TevI in yeast (37° C.). The negative control consists in a TALEN without any RVDs. n.d. indicates no detectable activity, +indicates an activity over 0.3 in yeast assay and +++indicates an activity over 0.7 in yeast assay (International PCT Applications WO 2004/067736 and in Epinat, Arnould et al. 2003; Chames, Epinat et al. 2005; Arnould, Chames et al. 2006; Smith, Grizot et al. 2006).

[0023] FIG. 10: Activity of TALE-AvrBs3::TevI in mammalian cells. (Extrachromosomic assay in CHO-K1). pCLS8993 (SEQ ID NO: 194) is represented by a black bar and pCLS8994 (SEQ ID NO: 195) is represented by a dark grey bar. Negative control (empty vector) by a white bar and positive control (I-SceI meganuclease) by a light grey bar. Data are normalized relative to the positive control.

[0024] FIG. 11: Activity of TALE-AvrBs3::NucA in yeast (37° C.). The negative control is a target lacking a recognition site (neg. ctrl.: SEQ ID NO: 228). Compact is a target having only one recognition site (SEQ ID NO: 224). n.d. indicates no detectable activity, +indicates an activity over 0.3 in yeast assay at 37° C.; ++, activity over 0.5 in yeast assay at 37° C. and +++activity over 0.7 in yeast assay at 37° C. (International PCT Applications WO 2004/067736 and in Epinat, Arnould et al. 2003; Chames, Epinat et al. 2005; Arnould, Chames et al. 2006; Smith, Grizot et al. 2006).

[0025] FIG. 12: Activity of TALE-AvrBs3::ColE7 in yeast (37° C.). The negative control is a target lacking a recognition site (neg. ctrl.: SEQ ID NO: 228). Compact is a target having only one recognition site (SEQ ID NO: 224). n.d. indicates no detectable activity, +indicates an activity over 0.3 in yeast assay at 37° C.; ++, activity over 0.5 in yeast assay at 37° C. and +++activity over 0.7 in yeast assay at 37° C. (International PCT Applications WO 2004/067736 and in Epinat, Arnould et al. 2003; Chames, Epinat et al. 2005; Arnould, Chames et al. 2006; Smith, Grizot et al. 2006).

[0026] FIG. 13: Schematic and details of a TALE::CreI prototypical compact TALEN. This class of compact TALEN targets a bipartite recognition sequence comprised of the TALE DNA binding site proximal to a meganuclease target site. The engineered TCRB02-A meganuclease site is shown along with details of the RVDs and DNA sequences recognized by the TALE moiety. A region of the T cell receptor B gene is presented, highlighting the endogenous layout of the TALE::CreI-based compact TALEN hybrid target site.

[0027] FIG. 14: Activity of TALE::scTB2aD01-based constructs in yeast (30° C.). The layouts of the various hybrid targets are shown, starting (5′) with the region recognized by the TALE DNA binding domain in uppercase, the unspecific spacer region in lowercase and the meganuclease target site in underlined uppercase characters. Activity in yeast is illustrated for select representative constructs. n.d. indicates no detectable activity, +indicates an activity over 0.3 in yeast assay at 30° C.; ++, activity over 0.5 in yeast assay at 30° C. and +++activity over 0.7 in yeast assay at 30° C. (International PCT Applications WO 2004/067736 and in Epinat, Arnould et al. 2003; Chames, Epinat et al. 2005; Arnould, Chames et al. 2006; Smith, Grizot et al. 2006).

[0028] FIG. 15: Western blot of TALE::scTB2aD01-based constructs. Constructs were expressed in HEK293 cells and total protein extracts were prepared 48 hours post-transfection. Protein was detected using a polyclonal anti-1-CreI antibody.

[0029] FIG. 16: Toxicity of TALE::scTB2aD01-based constructs in CHOK1 cells. Cytotoxicty is based on detectable levels of GFP expressed in living cells, on day 1 vs day 6, relative to a standard control (transfection of empty plasmid).

[0030] FIG. 17: NHEJ activity of TALE::scTB2aD01-based constructs in HEK293 cells. A post-transfection PCR-based analysis of genomic DNA is used to assess activity in vivo. Cleavage of mismatched DNA sequences by T7 endonuclease is indicative of NHEJ events resulting from the activity of the cTALEN or meganuclease at the targeted locus.

[0031] FIG. 18: Activity of TevI::TALE-AvrBs3 +/−-TALE-RagT2-R::TevI in yeast (37° C.). The negative control is a target lacking a recognition site (neg. ctrl.: SEQ ID NO: 228). n.d. indicates no detectable activity, +indicates an activity over 0.3 in yeast assay at 37° C.; ++, activity over 0.5 in yeast assay at 37° C. and +++activity over 0.7 in yeast assay at 37° C. (International PCT Applications WO 2004/067736 and in Epinat, Arnould et al. 2003; Chames, Epinat et al. 2005; Arnould, Chames et al. 2006; Smith, Grizot et al. 2006).

[0032] FIG. 19: Activity of TALE::SnaseSTAAU in yeast (37° C.). The negative control is a target lacking recognition sites. Compact is a target having only one recognition site (SEQ ID NO: 224). n.d. indicates no detectable activity at 37° C., +/−indicated an activity above 0.3 in yeast assay at 37° C.; +indicated an activity over 0.3 in yeast assay at 37° C.; ++indicated an activity over 0.5 in yeast assay at 37° C.; +++indicated an activity over 0.75 in yeast assay at 37° C. (International PCT Applications WO 2004/067736 and in Epinat, Arnould et al. 2003; Chames, Epinat et al. 2005; Arnould, Chames et al. 2006; Smith, Grizot et al. 2006).

[0033] FIG. 20: Activity of TALENColE7 with various polypeptide linker in yeast (37° C.). Compact is a target having only one recognition site (SEQ ID NO: 224). n.d. indicates no detectable activity at 37° C., +indicated an activity over 0.3 in yeast assay at 37° C.; ++indicated an activity over 0.5 in yeast assay at 37° C.; +++indicated an activity over 0.75 in yeast assay at 37° C. (International PCT Applications WO 2004/067736 and in Epinat, Arnould et al. 2003; Chames, Epinat et al. 2005; Arnould, Chames et al. 2006; Smith, Grizot et al. 2006).

[0034] Table 6: List of AvrBs3 targets with various spacer lengths (SEQ ID NO: 157 to 192).

[0035] Table 7: List of AvrBs3 targets with various spacer lengths (SEQ ID NO: 157 to 192) including a target with only one recognition site (compact, SEQ ID NO: 224) and a negative control target (neg. ctrl., SEQ ID NO: 228) consisting in a target without any recognition site.

[0036] Table 13: List of hybrid RagT2-R/AvrBs3 targets with various spacer lengths (SEQ ID NO: 315 to 350).

### DETAILED DESCRIPTION OF THE INVENTION

[0037] Unless specifically defined herein, all technical and scientific terms used have the same meaning as commonly understood by a skilled artisan in the fields of gene therapy, biochemistry, genetics, and molecular biology.

[0038] All methods and materials similar or equivalent to those described herein can be used in the practice or testing of the present invention, with suitable methods and materials being described herein. All publications, patent applications, patents, and other references mentioned herein are incorporated by reference in their entirety. In case of conflict, the present specification, including definitions, will prevail. Further, the materials, methods, and examples are illustrative only and are not intended to be limiting, unless otherwise specified.

[0039] The practice of the present invention will employ, unless otherwise indicated, conventional techniques of cell biology, cell culture, molecular biology, transgenic biology, microbiology, recombinant DNA, and immunology, which are within the skill of the art. Such techniques are explained fully in the literature. See, for example, Current Protocols in Molecular Biology (Frederick M. AUSUBEL, 2000, Wiley and son Inc, Library of Congress, USA); Molecular Cloning: A Laboratory Manual, Third Edition, (Sambrook et al, 2001, Cold Spring Harbor, N.Y.: Cold Spring Harbor Laboratory Press); Oligonucleotide Synthesis (M. J. Gait ed., 1984); Mullis et al. U.S. Pat. No. 4,683,195; Nucleic Acid Hybridization (B. D. Harries & S. J. Higgins eds. 1984); Transcription And Translation (B. D. Hames & S. J. Higgins eds. 1984); Culture Of Animal Cells (R. I. Freshney, Alan R. Liss, Inc., 1987); Immobilized Cells And Enzymes (IRL Press, 1986); B. Perbal, A Practical Guide To Molecular Cloning (1984); the series, Methods In ENZYMOLOGY (J. Abelson and M. Simon, eds.-in-chief, Academic Press, Inc., New York), specifically, Vols. 154 and 155 (Wu et al. eds.) and Vol. 185, “Gene Expression Technology” (D. Goeddel, ed.); Gene Transfer Vectors For Mammalian Cells (J. H. Miller and M. P. Calos eds., 1987, Cold Spring Harbor Laboratory); Immunochemical Methods In Cell And Molecular Biology (Mayer and Walker, eds., Academic Press, London, 1987); Handbook Of Experimental Immunology, Volumes I-IV (D. M. Weir and C. C. Blackwell, eds., 1986); and Manipulating the Mouse Embryo, (Cold Spring Harbor Laboratory Press, Cold Spring Harbor, N.Y., 1986).

[0040] In a first aspect, the present invention relates to a method to generate compact Transcription Activator-Like Effector Nucleases (cTALENs) composed of a single polypeptide chain that do not require dimerization to target a specific single double-stranded DNA target sequence of interest and process DNA nearby said single double-stranded DNA target sequence of interest.

[0041] According to a first aspect of the present invention is a method to generate compact Transcription Activator-Like Effector Nucleases (cTALENs) comprising the steps of:
[0042] (i) Engineering a core TALE scaffold (a) comprising different sets of Repeat Variable Dipeptide regions (RVDs) to change DNA binding specificity and target a specific single double-stranded DNA target sequence of interest, (b) onto which a selection of catalytic domains can be attached to effect DNA processing;
[0043] (ii) Determining or engineering at least one catalytic domain wherein said catalytic domain is capable of processing DNA nearby said single double-stranded DNA target sequence of interest when fused to said engineered core TALE scaffold from (i);
[0044] (iii) Optionally determining or engineering a peptidic linker to fuse said catalytic domain from (ii) to said engineered core TALE scaffold from (i);
   thereby obtaining a compact TALEN entity composed of a single polypeptide chain that does not require dimerization to target a specific single double-stranded DNA target sequence of interest and process DNA nearby said single double-stranded DNA target sequence of interest. In other words, the compact TALEN according to the present invention is an active entity unit able, by itself, to target only one specific single double-stranded DNA target sequence of interest through one DNA binding domain and to process DNA nearby said single double-stranded DNA target sequence of interest.

[0045] In another embodiment, is a method for targeting and processing a double-stranded DNA, comprising:
[0046] (a) Selecting one DNA target sequence of interest on one strand of a double-stranded DNA;
[0047] (b) Providing a unique compact TALEN monomer comprising:
   [0048] (i) One core TALE scaffold comprising Repeat Variable Dipeptide regions (RVDs) having DNA binding specificity onto said DNA target sequence of interest;
   [0049] (ii) At least one catalytic domain wherein said catalytic domain is capable of processing DNA a few base pairs away from said DNA target sequence of interest when fused to the C and/or N terminal of said core TALE scaffold from (i);
   [0050] (iii) Optionally one peptidic linker to fuse said catalytic domain from (ii) to said core TALE scaffold from (i) when needed;
[0051] wherein said compact TALEN monomer is assembled to bind and process said double stranded DNA without requiring dimerization;
[0052] (c) Contacting said double-stranded DNA with said unique monomer such that the double-stranded is processed a few base pairs away in 3′ and/or 5′ direction(s) from said one strand target sequence.

[0053] In another embodiment, said engineered core TALE scaffold according to the present invention comprises an additional N-terminal domain resulting in an engineered core TALE scaffold sequentially comprising a N-terminal domain and different sets of Repeat Variable Dipeptide regions (RVDs) to change DNA binding specificity and target a specific single double-stranded DNA target sequence of interest, onto which a selection of catalytic domains can be attached to effect DNA processing.

[0054] In another embodiment, said engineered core TALE scaffold according to the present invention comprises an additional C-terminal domain resulting in an engineered core TALE scaffold sequentially comprising different sets of Repeat Variable Dipeptide regions (RVDs) to change DNA binding specificity and target a specific single double-stranded DNA target sequence of interest and a C-terminal domain, onto which a selection of catalytic domains can be attached to effect DNA processing.

[0055] In another embodiment, said engineered core TALE-scaffold according to the present invention comprises additional N-terminus and a C-terminal domains resulting in an engineered core TALE scaffold sequentially comprising a N-terminal domain, different sets of Repeat Variable Dipeptide regions (RVDs) to change DNA binding specificity and target a specific single double-stranded DNA target sequence of interest and a C-terminal domain, onto which a selection of catalytic domains can be attached to effect DNA processing. In another embodiment, said engineered core TALE-scaffold according to the present invention comprises the protein sequences selected from the group consisting of ST1 (SEQ ID NO: 134) and ST2 (SEQ ID NO: 135). In another embodiment, said engineered TALE-scaffold comprises a protein sequence having at least 80%, more preferably 90%, again more preferably 95% amino acid sequence identity with the protein sequences selected from the group consisting of SEQ ID NO: 134 and SEQ ID NO: 135.

[0056] In another embodiment, said engineered core TALE-scaffold according to the present invention comprises the protein sequences selected from the group consisting of bT1-Avr (SEQ ID NO: 136), bT2-Avr (SEQ ID NO: 137), bT1-Pth (SEQ ID NO: 138) and bT2-Pth (SEQ ID NO: 139). In another embodiment, said engineered TALE-scaffold comprises a protein sequence having at least 80%, more preferably 90%, again more preferably 95% amino acid sequence identity with the protein sequences selected from the group consisting of SEQ ID NO: 136 to SEQ ID NO: 139.

[0057] In a preferred embodiment according to the method of the present invention, said additional N-terminus and C-terminal domains of engineered core TALE scaffold are derived from natural TALE. In a more preferred embodiment said additional N-terminus and C-terminal domains of engineered core TALE scaffold are derived from natural TALE like AvrBs3, PthXo1, AvrHah1, PthA, Tal1c as non-limiting examples. In another more preferred embodiment, said additional N-terminus and/or said C-terminal domains are truncated forms of respective N-terminus and/or said C-terminal domains of natural TALE like AvrBs3, PthXo1, AvrHah1, PthA, Tal1c as non-limiting examples from which they are derived. In a more preferred embodiment, said additional N-terminus and C-terminal domains sequences of engineered core TALE scaffold are selected from the group consisting of ST1 SEQ ID NO: 134 and ST2 SEQ ID NO: 135 as respectively exemplified in baseline protein scaffolds bT1-Avr (SEQ ID NO: 136) or bT1-Pth (SEQ ID NO: 138) and bT2-Avr (SEQ ID NO: 137) or bT2-Pth (SEQ ID NO: 139).

[0058] In another embodiment, each RVD of said core scaffold is made of 30 to 42 amino acids, more preferably 33 or 34 wherein two critical amino acids located at positions 12 and 13 mediates the recognition of one nucleotide of said nucleic acid target sequence; equivalent two critical amino acids can be located at positions other than 12 and 13 specially in RVDs taller than 33 or 34 amino acids long. Preferably, RVDs associated with recognition of the different nucleotides are HD for recognizing C, NG for recognizing T, NI for recognizing A, NN for recognizing G or A, NS for recognizing A, C, G or T, HG for recognizing T, IG for recognizing T, NK for recognizing G, HA for recognizing C, ND for recognizing C, HI for recognizing C, HN for recognizing G, NA for recognizing G, SN for recognizing G or A and YG for recognizing T, TL for recognizing A, VT for recognizing A or G and SW for recognizing A. More preferably, RVDs associated with recognition of the nucleotides C, T, A, G/A and G respectively are selected from the group consisting of NN or NK for recognizing G, HD for recognizing C, NG for recognizing T and NI for recognizing A, TL for recognizing A, VT for recognizing A or G and SW for recognizing A. In another embodiment, RVDS associated with recognition of the nucleotide C are selected from the group consisting of N* and RVDS associated with recognition of the nucleotide T are selected from the group consisting of N* and H*, where * denotes a gap in the repeat sequence that corresponds to a lack of amino acid residue at the second position of the RVD. In another embodiment, critical amino acids 12 and 13 can be mutated towards other amino acid residues in order to modulate their specificity towards nucleotides A, T, C and G and in particular to enhance this specificity. By other amino acid residues is intended any of the twenty natural amino acid residues or unnatural amino acids derivatives.

[0059] In another embodiment, said core scaffold of the present invention comprises between 8 and 30 RVDs. More preferably, said core scaffold of the present invention comprises between 8 and 20 RVDs; again more preferably 15 RVDs.

[0060] In another embodiment, said core scaffold comprises an additional single truncated RVD made of 20 amino acids located at the C-terminus of said set of RVDs, i.e. an additional C-terminal half-RVD. In this case, said core scaffold of the present invention comprises between 8.5 and 30.5 RVDs, “0.5” referring to previously mentioned half-RVD (or terminal RVD, or half-repeat). More preferably, said core scaffold of the present invention comprises between 8.5 and 20.5 RVDs, again more preferably, 15.5 RVDs. In a preferred embodiment, said half-RVD is in a core scaffold context which allows a lack of specificity of said half-RVD toward nucleotides A, C, G, T. In a more preferred embodiment, said half-RVD is absent.

[0061] In another embodiment, said core scaffold of the present invention comprises RVDs of different origins. In a preferred embodiment, said core scaffold comprises RVDs originating from different naturally occurring TAL effectors. In another preferred embodiment, internal structure of some RVDs of the core scaffold of the present invention are constituted by structures or sequences originated from different naturally occurring TAL effectors. In another embodiment, said core scaffold of the present invention comprises RVDs-like domains. RVDs-like domains have a sequence different from naturally occurring RVDs but have the same function and/or global structure within said core scaffold of the present invention.

[0062] In another embodiment, said additional N-terminal domain of said engineered core TALE scaffold is an enhancer domain. In another embodiment, said enhancer domain is selected from the group consisting of Puf RNA binding protein or Ankyrin super-family, as non-limiting examples. In another embodiment, said enhancer domain sequence is selected from the group consisting of protein domains of SEQ ID NO: 4 and SEQ ID NO: 5, as non-limiting examples listed in Table 1, a functional mutant, a variant or a derivative thereof.

[0063] In another embodiment, said additional C-terminal domain of said engineered core TALE scaffold is an enhancer domain. In another embodiment, said enhancer domain is selected from the group consisting of hydrolase/transferase of Pseudomonas Aeuriginosa family, the polymerase domain from the Mycobacterium tuberculosis Ligase D family, the initiation factor elF2 from Pyrococcus family, the translation initiation factor Aif2 family, as non-limiting examples. In another embodiment, said enhancer domain sequence is selected from the group consisting of protein domains of SEQ ID NO: 6 to SEQ ID NO: 9, as non-limiting examples listed in Table 1, a functional mutant, a variant or a derivative thereof.

TABLE 1
List of enhancer domains for engineered core TALE scaffold.

| | | SEQ | |
|---|---|---|---|
| GENBANK/SWISS- | | ID | |
| PROT ID | NAME | NO | FASTA SEQUENCE |
| gi\|262368139\|pdb\| | fem-3 | 4 | >gi\|262368139\|pdb\|3K5Q\|A Chain A, Crystal Structure Of Fbf-2FBE |
| 3K5Q\| | | | COMPLEX |
| | | | SNNVLPTWSLDSNGEMRSRLSLSEVLDSGDLMKFAVDKTGCQFLEKAVKGSLTSYQKFQLFEQV |
| | | | IGRKDDFLKLSTNIFGNYLVQSVIGISLATNDDGYTKRQEKLKNFISSQMTDMCLDKFACRVIQ |
| | | | SSLQNMDLSLACKLVQALPRDARLIAICVDQNANHVIQKVVAVIPLKNWEFIVDFVATPEHLRQ |
| | | | ICSDKYGCRVVQTIIEKLTADSMNVDLTSAAQNLRERALQRLMTSVTNRCQELATNEYANYIIQ |
| | | | HIVSNDDLAVYRECIIEKCLMRNLLSLSQEKFASHVVEKAFLHAPLELLAEMMDEIFDGYIPHP |
| | | | DTGKDALDIMMFHQFGNYVVQCMLTICCDAVSGRRQTKEGGYDHAISFQDWLKKLHSRVTKERH |
| | | | RLSRFSSGKKMIETLANLRSTHPIYELQ |
| gi\|308387836\|pdb\| | aRep | 5 | >gi\|308387836\|pdb\|3LTJ\|A Chain A, Structure Of A New Family Of |
| 3LTJ\| | | | Artificial Alpha Helicoidal Repeat Proteins (Alpha-Rep) Based |
| | | | On Thermostable Heat-Like Repeats |
| | | | MRGSHHHHHHTDPEKVEMYIKNLQDDSYYVRRAAAYALGKIGDERAVEPLIKALKDEDAWVRRA |
| | | | AADALGQIGDERAVEPLIKALKDEDGWVRQSAAVALGQIGDERAVEPLIKALKDEDWFVRIAAA |
| | | | FALGEIGDERAVEPLIKALKDEDGWVRQSAADALGEIGGERVRAAMEKLAETGTGFARKVAVNY |
| | | | LETHKSLIS |
| gi\|109157579\|pdb\| | Pseudomonas | 6 | >gi\|109157579\|pdb\|2FAO\|A Chain A, Crystal Structure Of |
| 2FAO\| | Aeruginosa Ligd | | Pseudomonas Aeruginosa Ligd Polymerase Domain |
| | Polymerase | | MGARKASAGASRAATAGVRISHPQRLIDPSIQASKLELAEFHARYADLLLRDLRERPVSLVRGP |
| | Domain | | DGIGGELFFQKHAARLKIPGIVQLDPALDPGHPPLLQIRSAEALVGAVQMGSIEFHTWNASLAN |
| | | | LERPDRFVLDLDPDPALPWKRMLEATQLSLTLLDELGLRAFLKTSGGKGMHLLVPLERRHGWDE |
| | | | VKDFAQAISQHLARLMPERFSAVSGPRNRVGKIFVDYLRNSRGASTVAAYSVRAREGLPVSVPV |
| | | | FREELDSLQGANQWNLRSLPQRLDELAGDDPWADYAGTRQRISAAMRRQLGRG |
| 2R9L_A GI: | Mycobacterium | 7 | Polymerase Domain From Mycobacterium Tuberculosis Ligase D In |
| 164519498 | Tuberculosis | | Complex With Dna:Accession: 2R9L_A GI: 164519498 |
| | Ligase D | | >gi\|164519498\|pdb\|2R9L\|A Chain A, Polymerase Domain From |
| | | | Mycobacterium Tuberculosis Ligase D In Complex With Dna |
| | | | GSHMGSASEQRVTLTNADKVLYPATGTTKSDIFDYYAGVAEVMLGHIAGRPATRKRWPNGVDQP |
| | | | AFFEKQLALSAPPWLSRATVAHRSGTTTYPIIDSATGLAWIAQQAALEVHVPQWRFVAEPGSGE |
| | | | LNPGPATRLVFDLDPGEGVMMAQLAEVARAVRDLLADIGLVTFPVTSGSKGLHLYTPLDEPVSS |
| | | | RGATVLAKRVAQRLEQAMPALVTSTMTKSLRAGKVFVDWSQNSGSKTTIAPYSLRGRTHPTVAA |
| | | | PRTWAELDDPALRQLSYDEVLTRIARDGDLLERLDADAPVADRLTRY |
| 1KJZ_A | Large Gamma | 8 | Structure Of The Large Gamma Subunit Of Initiation Factor Eif2 |
| GI:20664108 | Subunit Of | | From Pyrococcus Abyssi-G235d Mutant:1KJZ_A GI:20664108, |
| | Initiation | | >gi\|20664108\|pdb\|1KJZ\|A Chain A, Structure Of The Large Gamma |
| | Factor Eif2 | | Subunit Of Initiation Factor Eif2 From Pyrococcus Abyssi-G235d |
| | From Pyrococcus | | Mutant |
| | Abyssi | | GEKRKSRQAEVNIGMVGHVDHGKTTLTKALTGVWTDTHSEELRRGITIKIGFADAEIRRCPNCG |
| | | | RYSTSPVCPYCGHETEFVRRVSFIDAPGHEALMTTMLAGASLMDGAILVIAANEPCPRPQTREH |
| | | | LMALQIIGQKNIIIAQNKIELVDKEKALENYRQIKEFIEGTVAENAPIIPISALHGANIDVLVK |
| | | | AIEDFIPTPKRDPNKPPKMLVLRSFDVNKPGTPPEKLVGGVLDGSIVQGKLKVGDEIEIRPGVP |
| | | | YEEHGRIKYEPITTEIVSLQAGGQFVEEAYPGGLVGVGTKLDPYLTKGDLMAGNVVGKPGKLPP |
| | | | VWDSLRLEVHLLERVVGTEQELKVEPIKRKEVLLLNVGTARTMGLVTGLGKDEIEVKLQIPVCA |
| | | | EPGDRVAISRQIGSRWRLIGYGIIKE |
| 2D74_A | Translation | 9 | Crystal Structure Of Translation Initiation Factor Aif2betagamma |
| GI:112490420 | Initiation | | Heterodimer:2D74_A GI:112490420, |
| | Factor | | >gi\|112490420\|pdb\|2D74\|A Chain A, Crystal Structure Of |
| | Aif2betagamma | | Translation Initiation Factor Aif2betagamma Heterodimer |
| | | | MGEKRKTRQAEVNIGMVGHVDHGKTTLTKALTGVWTDTHSEELRRGITIKIGFADAEIRRCSNC |
| | | | GRYSTSPICPYCGHETEFIRRVSFIDSPGHEALMTTMLAGASLMDGAILVIAANEPCPRPQTRE |
| | | | HLMALQIIGQKNIIIAQNKIELVDKEKALENYRQIKEFIKGTVAENAPIIPISALHGANIDVLV |
| | | | KAIEEFIPTPKRDSNKPPKMLVLRSFDVNKPGTPPEKLVGGVLDGSIVQGKLKVGDEIEIRPGV |
| | | | PYEEHGRIKYEPITTEIVSLQAGGQFVEEAYPGGLVGIGTKLDPYLTKGDLMAGNVVGKPGKLP |
| | | | PVWTDLRLEVHLLERVVGTEQELNVEPIKRKEVLLLNVGTARTMGLVTALGKDEIELKLQIPVC |
| | | | AEPGERVAISRQIGSRWRLIGYGIIKELEHHHHHH |

[0064] In another preferred embodiment according to the method of the present invention, the catalytic domain that is capable of processing DNA nearby the single double-stranded DNA target sequence of interest, when fused to said engineered core TALE scaffold according to the method of the present invention, is fused to the N-terminus part of said core TALE scaffold. In another preferred embodiment, said catalytic domain is fused to the C-terminus part of said core TALE scaffold. In another preferred embodiment two catalytic domains are fused to both N-terminus part of said core TALE scaffold and C-terminus part of said core TALE scaffold. In a more preferred embodiment, said catalytic domain has an enzymatic activity selected from the group consisting of nuclease activity, polymerase activity, kinase activity, phosphatase activity, methylase activity, topoisomerase activity, integrase activity, transposase activity or ligase activity. In another preferred embodiment, the catalytic domain fused to the core TALE scaffold of the present invention can be a transcription activator or repressor (i.e. a transcription regulator), or a protein that interacts with or modifies other proteins such as histones. Non-limiting examples of DNA processing activities of said compact TALEN of the present invention include, for example, creating or modifying epigenetic regulatory elements, making site-specific insertions, deletions, or repairs in DNA, controlling gene expression, and modifying chromatin structure.

[0065] In another more preferred embodiment, said catalytic domain has an endonuclease activity. In another more preferred embodiment, said catalytic domain has cleavage activity on said double-stranded DNA according to the method of the present invention. In another more preferred embodiment, said catalytic domain has a nickase activity on said double-stranded DNA according to the method of the present invention. In another more preferred embodiment, said catalytic domain is selected from the group consisting of proteins MmeI, Colicin-E7 (CEA7_ECOLX), Colicin-E9, APFL, EndA, Endo I (END1_ECOLI), Human Endo G (NUCG_HUMAN), Bovine Endo G (NUCG_BOVIN), R.HinP1I, I-BasI, I-BmoI, I-HmuI, I-TevI, I-TevII, I-TevIII, I-TwoI, R.MspI, R.MvaI, NucA, NucM, Vvn, Vvn_CLS, Staphylococcal nuclease (NUC_STAAU), Staphylococcal nuclease (NUC_STAHY), Micrococcal nuclease (NUC_SHIFL), Endonuclease yncB, Endodeoxyribonuclease I (ENRN_BPT7), Metnase, Nb.BsrDI, BsrDI A, Nt.BspD6I (R.BspD6I large subunit), ss.BspD6I (R.BspD6I small subunit), R.PleI, MlyI, AlwI, Mva1269I, BsrI, BsmI, Nb.BtsCI, Nt.BtsCI, R1.BtsI, R2.BtsI, BbvCI subunit 1, BbvCI subunit 2, Bpu10I alpha subunit, Bpu10I beta subunit, BmrI, BfiI, I-CreI, hExol (EXO1_HUMAN), Yeast Exol (EXO1_YEAST), E. coli Exol, Human TREX2, Mouse TREX1, Human TREX1, Bovine TREX1, Rat TREX1, Human DNA2, Yeast DNA2 (DNA2_YEAST) and VP16, as listed in Table 2 (SEQ ID NO: 10 to SEQ ID NO: 66 and SEQ ID NO: 1, 366 & 367), a functional mutant, a variant or a derivative thereof. In another preferred embodiment according to the method of the present invention, said catalytic domain is I-TevI (SEQ ID NO: 20), a functional mutant, a variant or a derivative thereof. In another preferred embodiment, catalytic domain I-TevI (SEQ ID NO: 20), a functional mutant, a variant or a derivative thereof is fused to the N-terminal domain of said core TALE scaffold according to the method of the present invention. In another preferred embodiment, said compact TALEN according to the method of the present invention comprises a protein sequence having at least 80%, more preferably 90%, again more preferably 95% amino acid sequence identity with the protein sequences selected from the group of SEQ ID NO: 420-432.

[0066] In another preferred embodiment, said catalytic domain is ColE7 (SEQ ID NO: 11), a functional mutant, a variant or a derivative thereof. In another preferred embodiment, catalytic domain ColE7 (SEQ ID NO: 11), a functional mutant, a variant or a derivative thereof is fused to the N-terminal domain of said core TALE scaffold according to the method of the present invention. In another preferred embodiment, catalytic domain ColE7 (SEQ ID NO: 11), a functional mutant, a variant or a derivative thereof is fused to the C-terminal domain of said core TALE scaffold according to the method of the present invention. In another preferred embodiment, said compact TALEN according to the method of the present invention comprises a protein sequence having at least 80%, more preferably 90%, again more preferably 95% amino acid sequence identity with the protein sequences selected from the group of SEQ ID NO: 435-438.

[0067] In another preferred embodiment, said catalytic domain is NucA (SEQ ID NO: 26), a functional mutant, a variant or a derivative thereof. In another preferred embodiment, catalytic domain NucA (SEQ ID NO: 26), a functional mutant, a variant or a derivative thereof is fused to the N-terminal domain of said core TALE scaffold according to the method of the present invention. In another preferred embodiment, catalytic domain NucA (SEQ ID NO: 26), a functional mutant, a variant or a derivative thereof is fused to the C-terminal domain of said core TALE scaffold according to the method of the present invention. In another preferred embodiment, said compact TALEN according to the method of the present invention comprises a protein sequence having at least 80%, more preferably 90%, again more preferably 95% amino acid sequence identity with the protein sequences selected from the group of SEQ ID NO: 433-434.

[0068] In another preferred embodiment, said catalytic domain is I-CreI (SEQ ID NO: 1), a functional mutant, a variant or a derivative thereof. In another preferred embodiment, catalytic domain I-CreI (SEQ ID NO: 1), a functional mutant, a variant or a derivative thereof is fused to the N-terminal domain of said core TALE scaffold according to the method of the present invention. In another preferred embodiment, catalytic domain I-CreI (SEQ ID NO: 1), a functional mutant, a variant or a derivative thereof is fused to the C-terminal domain of said core TALE scaffold according to the method of the present invention. In another preferred embodiment, said compact TALEN according to the method of the present invention comprises a protein sequence having at least 80%, more preferably 90%, again more preferably 95% amino acid sequence identity with the protein sequences selected from the group of SEQ ID NO: 439-441 and SEQ ID NO: 444-446.

[0069] In another embodiment, said catalytic domain is a restriction enzyme such as MmeI, R-HinPII, R.MspI, R.MvaI, Nb.BsrDI, BsrDI A, Nt.BspD6I, ss.BspD6I, R.PleI, MlyI and AlwI as non-limiting examples listed in table 2. In another more preferred embodiment, said catalytic domain has an exonuclease activity.

[0070] In another more preferred embodiment, any combinations of two catalytic domains selected from the group consisting of proteins MmeI, Colicin-E7 (CEA7_ECOLX), Colicin-E9, APFL, EndA, Endo I (END1_ECOLI), Human Endo G (NUCG_HUMAN), Bovine Endo G (NUCG_BOVIN), R.HinP1I, I-BasI, I-BmoI, I-HmuI, I-TevI, I-TevII, I-TevIII, I-TwoI, R.MspI, R.MvaI, NucA, NucM, Vvn, Vvn_CLS, Staphylococcal nuclease (NUC_STAAU), Staphylococcal nuclease (NUC_STAHY), Micrococcal nuclease (NUC_SHIFL), Endonuclease yncB, Endodeoxyribonuclease I (ENRN_BPT7), Metnase, Nb.BsrDI, BsrDI A, Nt.BspD6I (R.BspD6I large subunit), ss.BspD6I (R.BspD6I small subunit), R.PleI, MlyI, AlwI, Mva1269I, BsrI, BsmI, Nb.BtsCI, Nt.BtsCI, R1.BtsI, R2.BtsI, BbvCI subunit 1, BbvCI subunit 2, Bpu10I alpha subunit, Bpu10I beta subunit, BmrI, BfiI, I-CreI, hExol (EXO1_HUMAN), Yeast Exol (EXO1_YEAST), E. coli Exol, Human TREX2, Mouse TREX1, Human TREX1, Bovine TREX1, Rat TREX1, Human DNA2, Yeast DNA2 (DNA2_YEAST) and VP16, as listed in Table 2 (SEQ ID NO: 10 to SEQ ID NO: 66 and SEQ ID NO: 1, 366 & 367), a functional mutant, a variant or a derivative of these protein domains thereof, can be fused to both N-terminus part and C-terminus part of said core TALE scaffold, respectively. For example, I-HmuI catalytic domain can be fused to the N-terminus part of said core TALE scaffold and ColE7 catalytic domain can be fused to the C-terminus part of said core TALE scaffold. In another example, I-TevI catalytic domain can be fused to the N-terminus part of said core TALE scaffold and ColE7 catalytic domain can be fused to the C-terminus part of said core TALE scaffold. In another embodiment, according to the method of the present invention, said unique compact TALEN monomer comprises a combination of two catalytic domains respectively fused to the C-terminus part and to the N-terminus part of said core TALE scaffold selected from the group consisting of:
[0071] (i) A Nuc A domain (SEQ ID NO: 26) in N-terminus and a Nuc A domain (SEQ ID NO: 26) in C-terminus;
[0072] (ii) A ColE7 domain (SEQ ID NO: 11) in N-terminus and a ColE7 domain (SEQ ID NO: 11) in C-terminus;
[0073] (iii) A TevI domain (SEQ ID NO: 20) in N-terminus and a ColE7 domain (SEQ ID NO: 11) in C-terminus;
[0074] (iv) A TevI domain (SEQ ID NO: 20) in N-terminus and a NucA domain (SEQ ID NO: 26) in C-terminus;
[0075] (v) A ColE7 domain (SEQ ID NO: 11) in N-terminus and a NucA domain (SEQ ID NO: 26) in C-terminus;
[0076] (vi) A NucA domain (SEQ ID NO: 26) in N-terminus and a ColE7 domain (SEQ ID NO: 11) in C-terminus.

[0077] In another preferred embodiment, said compact TALEN according to the method of the present invention comprises a protein sequence having at least 80%, more preferably 90%, again more preferably 95% amino acid sequence identity with the protein sequences selected from the group consisting of SEQ ID NO: 448 and 450.

[0078] In another preferred embodiment, said compact TALEN according to the method of the present invention comprises a combination of two catalytic domains respectively fused to the C-terminus part and to the N-terminus part of said core TALE scaffold selected from the group consisting of:
[0079] (i) A TevI domain (SEQ ID NO: 20) in N-terminus and a FokI domain (SEQ ID NO: 368) in C-terminus;
[0080] (ii) A TevI domain (SEQ ID NO: 20) in N-terminus and a TevI domain (SEQ ID NO: 20) in C-terminus;
[0081] (iii) A scTrex2 domain (SEQ ID NO: 451) in N-terminus and a FokI domain (SEQ ID NO: 368) in C-terminus.

[0082] In another preferred embodiment, said compact TALEN according to the method of the present invention comprises a protein sequence having at least 80%, more preferably 90%, again more preferably 95% amino acid sequence identity with the protein sequences selected from the group consisting of SEQ ID NO: 447-450 and SEQ ID NO: 452.

[0083] In the scope of the present invention, it can be envisioned to insert said catalytic domain between two parts of the engineered core TALE scaffold according to the invention, each part comprising one set of RVDs. In this last case, the number of RVDs for each part of the engineered core TALE scaffold can be the same or not. In other words, it can be envisioned to split said core TALE scaffold of the present invention to insert one catalytic domain between the resulting two parts of said engineered core TALE scaffold. In another preferred embodiment, said compact TALEN according to the method of the present invention comprises a protein sequence having at least 80%, more preferably 90%, again more preferably 95% amino acid sequence identity with the protein sequences selected from the group consisting of SEQ ID NO: 453-455.

TABLE 2
List of catalytic/enhancer domains for compact TALENs or enhanced compact TALENs.

| GENBANK/ | | | |
|---|---|---|---|
| SWISS- | | SEQ ID | |
| PROT ID | NAME | NO | FASTA SEQUENCE |
| ACC85607.1 | MmeI | 10 | >gi\|186469979\|gb\|ACC85607.1\| MmeI [Methylophilus methylotrophus] |
| | | | MALSWNEIRRKAIEFSKRWEDASDENSQAKPFLIDFFEVFGITNKRVATFEHAVKKFAKAHKEQSRGFVD |
| | | | LFWPGILLIEMKSRGKDLDKAYDQALDYFSGIAERDLPRYVLVCDFQRFRLTDLITKESVEFLLKDLYQN |
| | | | VRSFGFIAGYQTQVIKPQDPINIKAAERMGKLHDTLKLVGYEGHALELYLVRLLFCLFAEDTTIFEKSLF |
| | | | QEYIETKTLEDGSDLAHHINTLFYVLNTPEQKRLKNLDEHLAAFPYINGKLFEEPLPPAQFDKAMREALL |
| | | | DLCSLDWSRISPAIFGSLFQSIMDAKKRRNLGAHYTSEANILKLIKPLFLDELWVEFEKVKNNKNKLLAF |
| | | | HKKLRGLTFFDPACGCGNFLVITYRELRLLEIEVIRGLHRGGQQVLDIEHLIQINVDQFFGIEIEEFPAQ |
| | | | IAQVALWLTDHQMNMKISDEFGNYFARIPLKSTPHILNANALQIDWNDVLEAKKCCFILGNPPFVGKSKQ |
| | | | TPGQKADLLSVFGNLKSASDLDLVAAWYPKAAHYIQTNANIRCAFVSTNSITQGEQVSLLWPLLLSLGIK |
| | | | INFAHRTFSWTNEASGVAAVHCVIIGFGLKDSDEKIIYEYESINGEPLAIKAKNINPYLRDGVDVIACKR |
| | | | QQPISKLPSMRYGNKPTDDGNFLFTDEEKNQFITNEPSSEKYFRRFVGGDEFINNTSRWCLWLDGADISE |
| | | | IRAMPLVLARIKKVQEFRLKSSAKPTRQSASTPMKFFYISQPDTDYLLIPETSSENRQFIPIGFVDRNVI |
| | | | SSNATYHIPSAEPLIFGLLSSTMHNCWMRNVGGRLESRYRYSASLVYNTFPWIQPNEKQSKAIEEAAFAI |
| | | | LKARSNYPNESLAGLYDPKTMPSELLKAHQKLDKAVDSVYGFKGPNTEIARIAFLFETYQKMTSLLPPEK |
| | | | EIKKSKGKN |
| Q47112.2 | Colicin-E7 | 11 | >gi\|12644448\|sp\|Q47112.2\|CEA7_ECOLX RecName: Full = Colicin-E7 |
| | (CEA7_ECOLX) | | MSGGDGRGHNSGAHNTGGNINGGPTGLGGRGGASDGSGWSSENNPWGGGSGSGVHWGGGSGHGNGGGNSN |
| | | | SGGGSNSSVAAPMAFGFPALAAPGAGTLGISVSGEALSAAIADIFAALKGPFKFSAWGIALYGILPSEIA |
| | | | KDDPNMMSKIVTSLPAETVTNVQVSTLPLDQATVSVTKRVTDVVKDTRQHIAVVAGVPMSVPVVNAKPTR |
| | | | TPGVFHASFPGVPSLTVSTVKGLPVSTTLPRGITEDKGRTAVPAGFTFGGGSHEAVIRFPKESGQKPVYV |
| | | | SVTDVLTPAQVKQRQDEEKRLQQEWNDAHPVEVAERNYEQARAELNQANKDVARNQERQAKAVQVYNSRK |
| | | | SELDAANKTLADAKAEIKQFERFAREPMAAGHRMWQMAGLKAQRAQTDVNNKKAAFDAAAKEKSDADVAL |
| | | | SSALERRKQKENKEKDAKAKLDKESKRNKPGKATGKGKPVNNKWLNNAGKDLGSPVPDRIANKLRDKEFK |
| | | | SFDDFRKKFWEEVSKDPELSKQFSRNNNDRMKVGKAPKTRTQDVSGKRTSFELHHEKPISQNGGVYDMDN |
| | | | ISVVTPKRHIDIHRGK |
| CAA38134.1 | EndA | 12 | >gi\|47374\|emb\|CAA38134.1\| EndA [Streptococcus pneumoniae] |
| | | | MNKKTROTLIGLLVLLLLSTGSYYIKQMPSAPNSPKTNLSQKKQASEAPSQALAESVLTDAVKSQIKGSL |
| | | | EWNGSGAFIVNGNKTNLDAKVSSKPYADNKTKTVGKETVPTVANALLSKATRQYKNRKETGNGSTSWTPP |
| | | | GWHQVKNLKGSYTHAVDRGHLLGYALIGGLDGFDASTSNPKNIAVQTAWANQAQAEYSTGQNYYESKVRK |
| | | | ALDQNKRVRYRVTLYYASNEDLVPSASQIEAKSSDGELEFNVLVPNVQKGLQLDYRTGEVTVTQ |
| P25736.1 | Endo I | 13 | >gi\|119325\|sp\|P25736.1\|END1_ECOLI RecName: Full = Endonuclease-1; |
| | (END1_ECOLI) | | AltName: Full = Endonuclease I; Short = Endo I; Flags: Precursor |
| | | | MYRYLSIAAVVLSAAFSGPALAEGINSFSQAKAAAVKVHADAPGTFYCGCKINWQGKKGVVDLQSCGYQV |
| | | | RKNENRASRVEWEHVVPAWQFGHQRQCWQDGGRKNCAKDPVYRKMESDMHNLQPSVGEVNGDRGNFMYSQ |
| | | | WNGGEGQYGQCAMKVDFKEKAAEPPARARGAIARTYFYMRDQYNLTLSRQQTQLFNAWNKMYPVTDWECE |
| | | | RDERIAKVQGNHNPYVQRACQARKS |
| Q14249.4 | Human Endo G | 14 | >gi\|317373579\|sp\|Q14249.4\|NUCG_HUMAN RecName: Full = Endonuclease G, |
| | (NUCG_HUMAN) | | mitochondrial; Short = Endo G; Flags: Precursor |
| | | | MRALRAGLTLASGAGLGAVVEGWRARREDARAAPGLLGRLPVLPVAAAAELPPVPGGPRGPGELAKYGLP |
| | | | GLAQLKSRESYVLCYDPRTRGALWVVEQLRPERLRGDGDRRECDFREDDSVHAYHRATNADYRGSGFDRG |
| | | | HLAAAANHRWSQKAMDDTFYLSNVAPQVPHLNQNAWNNLEKYSRSLTRSYQNVYVCTGPLFLPRTEADGK |
| | | | SYVKYQVIGKNHVAVPTHFFKVLILEAAGGQIELRTYVMPNAPVDEAIPLERFLVPIESIERASGLLFVP |
| | | | NILARAGSLKAITAGSK |
| P38447.1 | Bovine Endo G | 15 | >gi\|585596\|sp\|P38447.1\|NUCG_BOVIN RecName: Full = Endonuclease G, |
| | (NUCG_BOVIN) | | mitochondrial; Short = Endo G; Flags: Precursor |
| | | | MQLLRAGLTLALGAGLGAAAESWWRQRADARATPGLLSRLPVLPVAAAAGLPAVPGAPAGGGPGELAKYG |
| | | | LPGVAQLKSRASYVLCYDPRTRGALWVVEQLRPEGLRGDGNRSSCDFHEDDSVHAYHRATNADYRGSGFD |
| | | | RGHLAAAANHRWSQKAMDDTFYLSNVAPQVPHLNQNAWNNLEKYSRSLTRTYQNVYVCTGPLFLPRTEAD |
| | | | GKSYVKYQVIGKNHVAVPTHFFKVLILEAAGGQIELRSYVMPNAPVDEAIPLEHFLVPIESIERASGLLF |
| | | | VPNILARAGSLKAITAGSK |
| AAW33811.1 | R.HinP1I | 16 | >gi\|57116674\|gb\|AAW33811.1\| R.HinP1I restriction endonuclease |
| | | | [Haemophilus influenzae] |
| | | | MNLVELGSKTAKDGFKNEKDIADRFENWKENSEAQDWLVTMGHNLDEIKSVKAVVLSGYKSDINVQVLVF |
| | | | YKDALDIHNIQVKLVSNKRGFNQIDKHWLAHYQEMWKFDDNLLRILRHFTGELPPYHSNTKDKARMFMTE |
| | | | FSQEEQNIVLNWLEKNRVLVLTDILRGRGDFAAEWVLVAQKVSNNARWILRNINEVLQHYGSGDISLSPR |
| | | | GSINFGRVTIQRKGGDNGRETANMLQFKIDPTELFDI |
| AAO93095.1 | I-BasI | 17 | >gi\|29838473\|gb\|AAO93095.1\| I-BasI [Bacillus phage Bastille] |
| | | | MFQEEWKDVTGFEDYYEVSNKGRVASKRTGVIMAQYKINSGYLCIKFTVNKKRTSHLVHRLVAREFCEGY |
| | | | SPELDVNHKDTDRMNNNYDNLEWLTRADNLKDVRERGKLNTHTAREALAKVSKKAVDVYTKDGSEYIATY |
| | | | PSATEAAEALGVQGAKISTVCHGKRQHTGGYHFKFNSSVDPNRSVSKK |
| AAK09365.1 | I-BmoI | 18 | >gi\|12958590\|gb\|AAK09365.1\|AF321518_2 intron encoded I-BmoI [Bacillus |
| | | | mojavensis] |
| | | | MKSGVYKITNKNTGKFYIGSSEDCESRLKVHFRNLKNNRHINRYLNNSFNKHGEQVFIGEVIHILPIEEA |
| | | | IAKEQWYIDNFYEEMYNISKSAYHGGDLTSYHPDKRNIILKRADSLKKVYLKMTSEEKAKRWQCVQGENN |
| | | | PMFGRKHTETTKLKISNHNKLYYSTHKNPFKGKKHSEESKTKLSEYASQRVGEKNPFYGKTHSDEFKTYM |
| | | | SKKFKGRKPKNSRPVIIDGTEYESATEASRQLNVVPATILHRIKSKNEKYSGYFYK |
| P34081.1 | I-HmuI | 19 | >gi\|465641\|sp\|P34081.1\|HMUI_BPSP1 RecName: Full = DNA endonuclease I- |
| | | | HmuI; AltName: Full = HNH homing endonuclease I-HmuI |
| | | | MEWKDIKGYEGHYQVSNTGEVYSIKSGKTLKHQIPKDGYHRIGLFKGGKGKTFQVHRLVAIHFCEGYEEG |
| | | | LVVDHKDGNKDNNLSTNLRWVTQKINVENQMSRGTLNVSKAQQIAKIKNQKPIIVISPDGIEKEYPSTKC |
| | | | ACEELGLTRGKVTDVLKGHRIHHKGYTFRYKLNG |
| P13299.2 | I-TevI | 20 | >gi\|6094464\|sp\|P13299.2\|TEV1_BPT4 RecName: Full = Intron-associated |
| | | | endonuclease 1; AltName: Full = I-TevI; AltName: Full = IRF protein |
| | | | MKSGIYQIKNTLNNKVYVGSAKDFEKRWKRHFKDLEKGCHSSIKLQRSFNKHGNVFECSILEEIPYEKDL |
| | | | IIERENFWIKELNSKINGYNIADATFGDTCSTHPLKEEIIKKRSETVKAKMLKLGPDGRKALYSKPGSKN |
| | | | GRWNPETHKFCKCGVRIQTSAYTCSKCRNRSGENNSFFNHKESDITKSKISEKMKGKKPSNIKKISCDGV |
| | | | IFDCAADAARHFKISSGLVTYRVKSDKWNWFYINA |
| P07072.2 | I-TevII | 21 | >gi\|20141823\|sp\|P07072.2\|TEV2_BPT4 RecName: Full = Intron-associated |
| | | | endonuclease 2; AltName: Full = I-TevII |
| | | | MKWKLRKSLKIANSVAFTYMVRFPDKSFYIGFKKFKTIYGKDTNWKEYNSSSKLVKEKLKDYKAKWIILQ |
| | | | VFDSYESALKHEEMLIRKYFNNEFILNKSIGGYKFNKYPDSEEHKQKLSNAHKGKILSLKHKDKIREKLI |
| | | | EHYKNNSRSEAHVKNNIGSRTAKKTVSIALKSGNKFRSFKSAAKFLKCSEEQVSNHPNVIDIKITIHPVP |
| | | | EYVKINDNIYKSFVDAAKDLKLHPSRIKDLCLDDNYPNYIVSYKRVEK |
| Q38419.1 | I-TevIII | 22 | >gi\|11387192\|sp\|Q38419.1\|TEV3_BPR03 RecName: Full = Intron-associated |
| | | | endonuclease 3; AltName: Full = I-TevIII |
| | | | MNYRKIWIDANGPIPKDSDGRTDEIHHKDGNRENNDLDNLMCLSIQEHYDIHLAQKDYQACHAIKLRMKY |
| | | | SPEEISELASKAAKSREIQIFNIPEVRAKNIASIKSKIENGTFHLLDGEIQRKSNLNRVALGIHNFQQAE |
| | | | HIAKVKERNIAAIKEGTHVFCGGKMQSETQSKRVNDGSHHFLSEDHKKRTSAKTLEMVKNGTHPAQKEIT |
| | | | CDFCGHIGKGPGFYLKHNDRCKLNPNRIQLNCPYCDKKDLSPSTYKRWHGDNCKARFND |
| AAM00817.1 | I-TwoI | 23 | >gi\|19881200\|gb\|AAM00817.1\|AF485080_2 HNH endonuclease I-TwoI |
| | | | [Staphylococcus phage Twort] |
| | | | MEELWKEIPGFNSYMISNKGQVYSRKANKILALRTDKNGYKRISIFNNEGKRILLGVHKLVLLGFKGINT |
| | | | EKPIPHHKNNIKDDNRLENLEWVTVSENTKHAYDIGALKSPRRVTCTLYYKGEPLSCYDSLFDLAKALKV |
| | | | SRSVIESPRNGLVLSTFEVKREPTIQGLPLNKEIFEHSLIKGLGNPPLKVYNEDETYYFLTLMDISKYFN |
| | | | ESYSKVQRGYYKGKWKSYIIEHIDFYEYYKQTH |
| P11405.1 | R.MspI | 24 | >gi\|135239\|sp\|P11405.1\|T2M1_MORSP RecName: Full = Type-2 restriction |
| | | | enzyme MspI; Short = R.MspI; FatName: Full = Endonuclease MspI; |
| | | | AltName: Full = Type II restriction enzyme MspI |
| | | | MRTELLSKLYDDFGIDQLPHTQHGVTSDRLGKLYEKYILDIFKDIESLKKYNTNAFPQEKDISSKLLKAL |
| | | | NLDLDNIIDVSSSDTDLGRTIAGGSPKTDATIRFTFHNQSSRLVPLNIKHSSKKKVSIAEYDVETICTGV |
| | | | GISDGELKELIRKHQNDQSAKLFTPVQKQRLTELLEPYRERFIRWCVTLRAEKSEGNILHPDLLIRFQVI |
| | | | DREYVDVTIKNIDDYVSDRIAEGSKARKPGFGTGLNWTYASGSKAKKMQFKG |
| R.MvaI | R.MvaI | 25 | >gi\|119392963\|gb\|AAM03024.2\|AF472612_1 R.MvaI [Kocuria varians] |
| | | | MSEYLNLLKEAIQNVVDGGWHETKRKGNTGIGKTFEDLLEKEEDNLDAPDFHDIEIKTHETAAKSLLTLF |
| | | | TKSPTNPRGANTMLRNRYGKKDEYGNNILHQTVSGNRKTNSNSYNYDFKIDIDWESQVVRLEVFDKQDIM |
| | | | IDNSVYWSFDSLQNQLDKKLKYIAVISAESKIENEKKYYKYNSANLFTDLTVQSLCRGIENGDIKVDIRI |
| | | | GAYHSGKKKGKTHDHGTAFRINMEKLLEYGEVKVIV |
| CAA45962.1 | NucA | 26 | gi\|39041\|emb\|CAA45962.1\| NucA [Nostoc sp. PCC 7120] |
| | | | MGICGKLGVAALVALIVGCSPVQSQVPPLTELSPSISVELLLGNPSGATPTKLTPDNYLMVXNQYALSYN |
| | | | NSKGTANWVAWQLNSSWLGNAERQDNFRPDKTLPAGWVRVTPSMYSGSGYDRGHIAPSADRTKTTEDNAA |
| | | | TFLMTNMMPQTPDNNRNTWGNLEDYCRELVSQGKELYIVAGPNGSLGKPLKGKVTVPKSTWKIVVVLDSP |
| | | | GSGLEGITANTRVIAVNIPNDPELNNDWRAYKVSVDELESLTGYDFLSNVSPNIQTSIESKVDN |
| P37994.2 | NucM | 27 | gi\|313104150\|sp\|P37994.2\|NUCM_DICD3 RecName: Full Nuclease nucM; |
| | | | Flags: Precursor |
| | | | MLRNLVIFAVLGAGLTTLAAAGQDINNFTQAKAAAAKIHQDAPGTFYCGCKINWQGKKGTPDLASCGYQV |
| | | | RKDANRASRIEWEHVVPAWQFGHQRQCWQDGGRKNCTKDDVYRQIETDLHNLQPAIGEVNGDRGNFMYSQ |
| | | | WNGGERQYGQCEMKIDFKSQLAEPPERARGAIARTYFYMRDRYNLNLSRQQTQLFDAWNKQYPATTWECT |
| | | | REKRIAAVQGNHNPYVQQACQP |
| AAF19759.1 | Vvn | 28 | >gi\|6635279\|gb\|AAF19759.1\|AF063303_1 nuclease precursor Vvn [Vibrio |
| | | | vulnificus] |
| | | | MKRLFIFIASFTAFAIQAAPPSSFSAAKQQAVKIYQDHPISFYCGCDIEWQGKKGIPNLETCGYQVRKQQ |
| | | | TRASRIEWEHVVPAWQFGHHRQCWQKGGRKNCSKNDQQFRLMEADLHNLTPAIGEVNGDRSNFNFSQWNG |
| | | | VDGVSYGRCEMQVNFKQRKVMPQTELRGSIARTYLYMSQEYGFQLSKQQQQLMQAWNKSYPVDEWECTRD |
| | | | DRIAKIQGNHNPFVQQSCQTQ |
| AAF19759.1 | Vvn_CLS | 29 | >Vvn_CLS (variant of AAF19759.1) |
| (reference) | | | MASGAPPSSFSAAKQQAVKIYQDHPISFYCGCDIEWQGKKGIPNLETCGYQVRKQQTRASRIEWEHVVPA |
| | | | WQFGHHRQCWQKGGRKNCSKNDQQFRLMEADLHNLTPAIGEVNGDRSNFNFSQWNGVDGVSYGRCEMQVN |
| | | | FKQRKVMPPDRARGSIARTYLYMSQEYGFQLSKQQQQLMQAWNKSYPVDEWECTRDDRIAKIQGNHNPFV |
| | | | QQSCQTQGSSAD |
| P00644.1 | Staphylococcal | 30 | >gi\|128852\|sp\|P00644.1\|NUC_STAAU RecName: Full = Thermonuclease; |
| | nuclease | | Short = TNase; AltName: Full = Micrococcal nuclease; AltName: |
| | (NUC_STAAU) | | Full = Staphylococcal nuclease; Contains: RecName: Full = Nuclease B; |
| | | | Contains: RecName: Full = Nuclease A; Flags: Precursor |
| | | | MLVMTEYLLSAGICMAIVSILLIGMAISNVSKGQYAKREFFFATSCLVLTLVVVSSLSSSANASQTDNGV |
| | | | NRSGSEDPTVYSATSTKKLHKEPATLIKAIDGDTVKLMYKGQPMTFRLLLVDTPETKHPKKGVEKYGPEA |
| | | | SAFTKKMVENAKKIEVEFDKGQRTDKYGRGLAYIYADGKMVNEALVRQGLAKVAYVYKPNNTHEQHLRKS |
| | | | EAQAKKEKLNIWSEDNADSGQ |
| P43270.1 | Staphylococcal | 31 | >gi\|1171859\|sp\|P43270.1\|NUC_STAHY RecName: Full = Thermonuclease; |
| | nuclease | | Short = TNase; AltName: Full = Micrococcal nuclease; AltName: |
| | (NUC_STAHY) | | Full = Staphylococcal nuclease; Flags: Precursor |
| | | | MKKITTGLIIVVAAIIVLSIQFMTESGPFKSAGLSNANEQTYKVIRVIDGDTIIVDKDGKQQNLRMIGVD |
| | | | TPETVKPNTPVQPYGREASDETKRHLTNQKVALEYDKQEKDRYGRTLAYVWLGKEMENEKLAKEGLARAK |
| | | | FYRPNYKYQERIEQAQKQAQKLKKNIWSN |
| P29769.1 | Micrococcal | 32 | >gi\|266681\|sp\|P29769.1\|NUC_SHIFL RecName: Full = Micrococcal nuclease; |
| | nuclease | | Flags: Precursor |
| | (NUC_SHIFL) | | MKSALAALRAVAAAVVLIVSVPAWADFRGEVVRILDGDTIDVLVNRQTIRVRLADIDAPESGQAFGSRAR |
| | | | QRLADLTFRQEVQVTEKEVDRYGRTLGVVYAPLQYPGGQTQLTNINAIMVQEGMAWAYRYYGKPTDAQMY |
| | | | EYEKEARRQRLGLWSDPNAQEPWKWRRASKNATN |
| P94492.1 | Endonuclease | 33 | gi\|81345826\|sp\|\|YNCB_BACSU RecName: Full = Endonuclease yncB; Flags: |
| | yncB | | Precursor |
| | | | MKKILISMIAIVLSITLAACGSNHAAKNHSDSNGTEQVSQDTHSNEYNQTEQKAGTPHSKNQKKLVNVTL |
| | | | DRAIDGDTIKVIYNGKKDTVRYLLVDTPETKKPNSCVQPYGEDASKRNKELVNSGKLQLEFDKGDRRDKY |
| | | | GALLAYVYVDGKSVQETLLKEGLARVAYVYEPNTKYIDQFRLDEQEAKSDKLSIWSKSGYVTNRGFNGCV |
| | | | K |
| P00641.1 | Endodeoxy- | 34 | >gi\|119370\|sp\|P00641.1\|ENRN_BPT7 RecName: Full = Endodeoxyribonuclease |
| | ribonu- | | 1; AltName: Full = Endodeoxyribonuclease I; Short = Endonuclease |
| | clease I | | MAGYGAKGIRKVGAFRSGLEDKVSKQLESKGIKFEYEEWKVPYVIPASNHTYTPDFLLPNGIFVETKGLW |
| | (ENRN_BPT7) | | ESDDRKKHLLIREQHPELDIRIVFSSSRTKLYKGSPTSYGEFCEKHGIKFADKLIPAEWIKEPKKEVPFD |
| | | | RLKRKGGKK |
| Q53H47.1 | Metnase | 35 | >gi\|74740552\|sp\|Q53H47.1\|SETMR_HUMAN RecName: Full = Histone-lysine N- |
| | | | methyltransferase SETMAR; AltName: Full = SET domain and mariner |
| | | | transposase fusion gene-containing protein; Short = HsMar1; |
| | | | Short = Metnase; Includes: RecName: Full = Histone-lysine N-methyl- |
| | | | transferase; Includes: RecName: Full = Mariner transposase Hsmar1 |
| | | | MAEFKEKPEAPTEQLDVACGQENLPVGAWPPGAAPAPFQYTPDHVVGPGADIDPTQITFPGCICVKTPCL |
| | | | PGTCSCLRHGENYDDNSCLRDIGSGGKYAEPVFECNVLCRCSDHCRNAVVQKGLQFHFQVFKTHKKGWGL |
| | | | RTLEFIPKGRFVCEYAGEVLGFSEVQRRIHLQTKSDSNYIIAIREHVYNGQVMETFVDPTYIGNIGRFLN |
| | | | HSCEPNLLMIPVRIDSMVPKLALFAAKDIVPEEELSYDYSGRYLNLTVSEDKERLDHGKLRKPCYCGAKS |
| | | | CTAFLPFDSSLYCPVEKSNISCGNEKEPSMCGSAPSVFPSCKRLTLETMKMMLDKKQIRAIFLFEFKMGR |
| | | | KAAETTRNINNAFGPGTANERTVQWWFKKFCKGDESLEDEERSGRPSEVDNDQLRAIIEADPLTTTREVA |
| | | | EELNVNHSTVVRHLKQIGKVKKLDKWVPHELTENQKNRRFEVSSSLILRNHNEPFLDRIVTCDEKWILYD |
| | | | NRRRSAQWLDQEEAPKHFPKPILHPKKVMVTIWWSAAGLIHYSFLNPGETITSEKYAQEIDEMNQKLQRL |
| | | | QLALVNRKGPILLHDNARPHVAQPTLQKLNELGYEVLPHPPYSPDLLPTNYHVFKHLNNFLQGKRFHNQQ |
| | | | DAENAFQEFVESQSTDFYATGINQLISRWQKCVDCNGSYFD |
| ABD15132.1 | Nb.BsrDI | 36 | >gi\|86757493\|gb\|ABD15132.1\| Nb.BSrDI [Geobacillus stearothermophilus] |
| | | | MTEYDLHLYADSFHEGHWCCENLAKIAQSDGGKHQIDYLQGFIPRHSLIFSDLIINITVFGSYKSWKHLP |
| | | | KQIKDLLFWGKPDFIAYDPKNDKILFAVEETGAVPTGNQALQRCERIYGSARKQIPFWYLLSEFGQHKDG |
| | | | GTRRDSIWPTIMGLKLTQLVKTPSIILHYSDINNPEDYNSGNGLKFLFKSLLQIIINYCTLKNPLKGMLE |
| | | | LLSIQYENMLEFIKSQWKEQIDFLPGEEILNTKTKELARMYASLAIGQTVKIPEELFNWPRTDKVNFKSP |
| | | | QGLIKYDELCYQLEKAVGSKKAYCLSNNAGAKPQKLESLKEWINSQKKLFDKAPKLTPPAEFNMKLDAFP |
| | | | VTSNNNYYVTTSKNILYLFDYWKDLRIAIETAFPRLKGKLPTDIDEKPALIYICNSVKPGRLFGDPFTGQ |
| | | | LSAFSTIFGKKNIDMPRIVVAYYPHQIYSQALPKNNKSNKGITLKKELTDFLIFHGGVVVKLNEGKAY |
| ABD15133.1 | BsrDI A | 37 | gi\|86757494\|gb\|ABD15133.1\| BsrDI A [Geobacillus stearothermophilus] |
| | | | MTDYRYSFELSEEIARWAFEIKTKNTDWFVAFSNPTAGPWKRVMAIDKASNREGEVHRFGREDERPDIIL |
| | | | VNDNISLILILEAKEKLNQLISKSQVDKSVDVFLTLSSILKEKSDNNYWGDRTKYINVLGILWGSEQETS |
| | | | QKDIDNAFRVYRDSLVKNLKEINPTPTNICTDILVGVESIKNKKEEISIKIHVSNIYAEIYPKFTGKHLL |
| | | | EKLAVLN |
| ABN42182.1 | Nt.BspD6I | 38 | gi\|125396996\|gb\|ABN42182.1\| heterodimeric restriction endonuclease |
| | (R.BspD6I | | R.BspD6I large subunit [Bacillus sp. D6] |
| | large | | MAKKVNWYVSCSPRSPEKIQPELKVLANFEGSYWKGVKGYKAQEAFAKELAALPQFLGTTYKKEAAFSTR |
| | subunit) | | DRVAPMKTYGFVFVDEEGYLRITEAGKMLANNRRPKDVFLKQLVKWQYPSFQHKGKEYPEEEWSINPLVF |
| | | | VLSLLKKVGGLSKLDIAMFCLTATNNNQVDEIAEEIMQFRNEREKIKGQNKKLEFTENYFFKRFEKIYGN |
| | | | VGKIREGKSDSSHKSKIETKMANARDVADATTRYFRYTGLEVARGNQLVLNPEKSDLIDEIISSSKVVKN |
| | | | YTRVEEFHEYYGNPSLPQFSFETKEQLLDLAHRIRDENTRLAEQLVEHFPNVRVEIQVLEDIYNSLNKKV |
| | | | DVETLKDVIYHAKELQLELKKKKLQADFNDPRQLEEVIDLLEVYHEKKNVIEEKIKARFIANKNTVFEWL |
| | | | TWNGFIILGNALEYKNNFVIDEELQPVTHAAGNQPDMEIIYEDFIVLGEVTTSKGATQFKMESEPVTRHY |
| | | | LNKKKELEKQGVEKELYCLFIAPEINKNTFEEFMKYNIVQNTRIIPLSLKQFNMLLMVQKKLIEKGRRLS |
| | | | SYDIKNLMVSLYRTTIECERKYTQIKAGLEETLNNWVVDKEVRF |
| ABN42183.1 | ss.BspD6I | 39 | >gi\|125396997\|gbABN42183.1\| heterodimeric restriction endonuclease |
| | (R.BspD6I | | R.BspD6I small subunit [Bacillus sp. D6] |
| | small | | MQDILDFYEEVEKTINPPNYFEWNTYRVFKKLGSYKNLVPNFKLDDSGHPIGNAIPGVEDILVEYEHFSI |
| | subunit) | | LIECSLTIGEKQLDYEGDSVVRHLQEYKKKGIEAYTLFLGKSIDLSFARHIGFNKESEPVIPLTVDQFKK |
| | | | LVTQLKGDGEHFNPNKLKEILIKLLRSDLGYDQAEEWLTFIEYNLK |
| AAK27215.1 | R.PleI | 40 | >gi\|13448813\|gb\|AAK27215.1\|AF355461_2 restriction endonuclease R.PleI |
| | | | [Paucimonas lemoignei] |
| | | | MAKPIDSKVLFITTSPRTPEKMVPEIELLDKNFNGDVWNKDTQTAFMKILKEESFFDGEGKNDPAFSARD |
| | | | RINRAPKSLGFVILTPKLSLTDAGVELIKAKRKDDIFLRQMLKFQLPSPYHKLSDKAALFYVKPYLEIFR |
| | | | LVRHFGSLTFDELMIFGLQIIDFRIFNQIVDKIEDFRVGKIENKGRYKTYKKERFEEELGKIYKDELFGL |
| | | | TEASAKTLITKKGNNMRDYADACVRYLRATGMVNVSYQGKSLSIVQEKKEEVDFFLKNTEREPCFINDEA |
| | | | SYVSYLGNPNYPKLFVDDVDRIKKKLRFDFKKTNKVNALTLPELKEELENEILSRKENILKSQISDIKNF |
| | | | KLYEDIQEVFEKIENDRTLSDAPLMLEWNTWRAMTMLDGGEIKANLKFDDFGSPMSTAIGNMPDIVCEYD |
| | | | DEQLSVEVTMASGQKQYEMEGEPVSRHLGKLKKSSEKPVYCLFIAPKINPSSVANFFMSHKVDIEYYGGK |
| | | | SLIIPLELSVFRKMIEDTFKASYIPKSDNVHKLFKNFASIADEAGNEKVWYEGVKRTAMNWLSLS |
| AAK39546.1 | MlyI | 41 | >gi\|13786046\|gb\|AAK39546.1\|AF355462_2 MlyIR [Micrococcus lylae] |
| | | | MASLSKTKHLFGFTSPRTIEKIIPELDILSQQFSGKVWGENQINFFDAIFNSDFYEGTTYPQDPALAARD |
| | | | RITRAPKALGFIQLKPVIQLTKAGNQLVNQKRLPELFTKQLLKFQLPSPYHTQSPTVNFNVRPYLELLRL |
| | | | INELGSISKTEIALFFLQLVNYNKFDEIKNKILKFRETRKNNRSVSWKTYVSQEFEKQISIIFADEVTAK |
| | | | NFRTRESSDESFKKFVKTKEGNMKDYADAFFRYIRGTQLVTIDKNLHLKISSLKQDSVDFLLKNTDRNAL |
| | | | NLSLMEYENYLFDPDQLIVLEDNSGLINSKIKQLDDSINVESLKIDDAKDLLNDLEIQRKAKTIEDTVNH |
| | | | LKLRSDIEDILDVFAKIKKADVPDVPLFLEWNIWRAFAALNHTQAIEGNFIVDLDGMPLNTAPGKKPDIE |
| | | | INYGSFSCIVEVPMSSGETQFNMEGSSVPRHYGDLVRKVDHDAYCIFIAPKVAPGTKAHFFNLNRLSTKH |
| | | | YGGKTKIIPMSLDDFICFLQVGITHNFQDINKLKNWLDNLINFNLESEDEEIWFEEIISKISTWAI |
| YP_ | AlwI | 42 | >gi\|319768594\|ref\|YP_004134094.1\| restriction endonuclease, type II, |
| 004134094.1 | | | AlwI [Geobacillus sp. Y412MC52] |
| | | | MNKKNTRKVWFITRPERDPRFHQEALLALQKATDDFRLKWAGNREVEKRYEEELANMGIKRNNVSHDGSG |
| | | | GRTWMAMLKTFSYCYVDDDGYIRLTKVGEKLIQGEKVYENTRKQVLTLQYPNAYFLEPGFRPKFDEGFRI |
| | | | RPVLFLIKLANDERLDFYVTKEEITYFAMTAQKDSQLDEIVHKILAFRKAGPREREEMKQDIAAKFDHRE |
| | | | RSDKGARDFYEAHSDVAHTFMLISDYTGLVEYIRGKALKGDSSKINEIKQEIAEIEKRYPFNTRYMISLE |
| | | | RMAENSGLDVDSYKASRYGNIKPAANSSKLRAKAERILAQFPSIESMSKEEIAGALQKYLSPRDIEKVIH |
| | | | EIVENKDDFEGINSDFVETYLNEKDNLAFEDKTGQIFSALGFDVAMRPKAKNGERTEIEIIARYGGSKFG |
| | | | IIDAKNYAGKFPLSSSLVSHMASEYIPNYTGYEGKELTFFGYVTANDFSGERNLEKISDKAKRITGNPIS |
| | | | GFLVTARTLLGFLDYCIENDVPLEDRAELFVKAVKNKGYKSLEALLRELKETI |
| AAY97906.1 | Mva1269I | 43 | >gi\|68480350\|gb\|AAY97906.1\| Mva1269I restriction endonuclease [Kocuria |
| | | | varians] |
| | | | MYLNTAVFNIYGDNIVECSRAFHYILEGFKLANISITQEYDLQNITTPKFCIYTDKFRYIFIFIPGTSAS |
| | | | RWNKDIYKELVLNNGGPLKEGADAIITRIFSEDSELVLASMEFSAALPAGNNTWQRSGRAYSLTAANIPY |
| | | | FYIVQLGGKEIKKGKDGKSDKFATRLPNPALSLSFTLNTIKKPAPSLIVYDQAPEADSAISDLYSNCYGI |
| | | | DDFSLYLFKLITEENNLHELKNIYNKNVEFLQLRSVDEKGKNFSGKDYKYIFEHKDPYKGLTEVVKERKI |
| | | | PWKKKTATKTFENFPLRNQAPIFRLIDFLSTKSYGIVSKDSLPLTFIPSEHRVEVANYICNQLYIDKVSD |
| | | | EFVKWIYKKEDLAICIINGFKPGGDDSRPDRGLPPFTKMLTNLDILTLMFGPAPPTQWDYLDSDPEKLNK |
| | | | TNGLWQSIFAFSDAILVDSSTRDNNKFVYNAYLKEHWVVQREKKESNTPISYFPKSVGEHDVDTSLHILF |
| | | | TYIGKHFESACNPPGGDWSGVSLLKNNIEYRWTSMYRVSQDGTKRPDHIYQLVYNSTDTLLLIESKGIKN |
| | | | DLLKSKEANVGIGMINYLKNLMARDYTAVKKDGEWKNIHGQMTLDKFLTFSAVAYLFTTDFDNEYTSAAE |
| | | | LLVHSNTQLAFALEIKEKNSVMHIFTANTVAYNFAEYLLETMRNSHLPLKIYKPI |
| ADR72996.1 | BsrI | 44 | >gi\|313667100\|gb\|ADR72996.1\| BsrI [Geobacillus stearothermophilus] |
| | | | MRNIRIYSEVKEQGIFFKEVIQSVLEKANVEVVLVNSAMLDYSDVSVISLIRNQKKFDLLVSEVRDKREI |
| | | | PIVMVEFSTAVTTDDHELQRADAMFWAYKYKIPYLKISPMEKKSQTADDKFGGGRLLSVNDQIIHMYRTD |
| | | | GVMYHIEWESMDNSAYVKNAELYPSCPDCAPELASLFRCLLETIEKCENIEDYYRILLDKLGKQKVAVKW |
| | | | GNFREEKTLEQWKHEKFDLLERFSKSSSRMEYDKDKKELKIKVNRYGHAMDPERGILAFWKLVLGDEWKI |
| | | | VAEFQLQRKTLKGRQSYQSLFDEVSQEEKLMNIASEIIKNGNVISPDKAIEIHKLATSSTMISTIDLGTP |
| | | | ERKYITDDSLKGYLQHGLITNIYKNLLYYVDEIRFTDLQRKTIASLTWNKEIVNDYYKSLMDQLLDKNLR |
| | | | VLPLTSIKNISEDLITWSSKEILINLGYKILAASYPEAQGDRCILVGPTGKKTERKFIDLIAISPKSKGV |
| | | | ILLECKDKLSKSKDDCEKMNDLLNHNYDKVTKLINVLNINNYNYNNIIYTGVAGLIGRKNVDNLPVDFVI |
| | | | KFKYDAKNLKLNWEINSDILGKHSGSFSMEDVAVVRKRS |
| AAL86024.1 | BsmI | 45 | >gi\|19347662\|gb\|AAL86024.1\| BsmI [Geobacillus stearothermophilus] |
| | | | MNVFRINGDNIIECERVIDLILSKINPQKVKRGFISLSCPFIEIIFKEGHDYFHWRFDMFPGFNKNTNDR |
| | | | WNSNILDLLSQKGSFLYETPDVIITSLNNGKEEILMAIEFCSALQAGNQAWQRSGRAYSVGRTGYPYIYI |
| | | | VDFVKYELNNSDRSRKNLRFPNPAIPYSYISHSKNTGNFIVQAYFRGEEYQPKYDKKLKFFDETIFAEDD |
| | | | IADYIIAKLQHRDTSNIEQLLINKNLKMVEFLSKNTKNDNNFTYSEWESIYNGTYRITNLPSLGRFKFRK |
| | | | KIAEKSLSGKVKEENNIVQRYSVGLASSDLPFGVIRKESANDFINDVCKLYNINDMKIIKELKEDADLIV |
| | | | CMLKGFKPRGDDNRPDRGALPLVAMLAGENAQIFTFIYGPLIKGAINLIDQDINKLAKRNGLWKSFVSLS |
| | | | DFIVLDCPIIGESYNEFRLIINKNNKESILRKTSKQQNILVDPTPNHYQENDVDTVIYSIFKYIVPNCFS |
| | | | GMCNPPGGDWSGLSIIRNGHEFRWLSLPRVSENGKRPDHVIQILDLFEKPLLLSIESKEKPNDLEPKIGV |
| | | | QLIKYIEYLFDFTPSVQRKIAGGNWEFGNKSLVPNDFILLSAGAFIDYDNLTENDYEKIFEVTGCDLLIA |
| | | | IKNQNNPQKWVIKFKPKNTIAEKLVNYIKLNFKSNIFDTGFFHIEG |
| ADI24225.1 | Nb.BtsCI | 46 | >gi\|297185870\|gb\|AD124225.1\| BtsCI bottom-strand nicking enzyme |
| | | | variant [synthetic construct] |
| | | | MKRILYLLTEERPKINIIHQIINLEYKATLHFGAKIVPVMNEENKFTFIYHVKGIEVEGFDAVLIKIVSG |
| | | | HSSFVDYLVFDSNDLKPEKNTITLFDLDQYELDLSYYFGKGWIVRIPSPSDLPKYVVEETKTDDHESRNT |
| | | | NAYQRSSKFVFCELYYGKEVKKYMLYDISDGRTLSGTDTHNFGMRMLVTNNVNLVGVPNMYLPFTDIKEF |
| | | | INEKNRIADNGPSHNVPIRLKLDKEKNVIYISAKLDKGNGKNKNKISNDPNIGAVAIISATLANLNWKGD |
| | | | IEIINHNLLPSSISSRSNGNKLLYIMKKLGVRFNNINVNWNNIKNNINYFFYNITSEKIVSIYYHLYVED |
| | | | KLSNARVIFDNHAGCGKSYFRTLNNKIIPVGKEIPLPALVIFDSDQNIVKVIAAAKAENVYNGVEQLSTF |
| | | | DKFIESYINKYYPGAAVECSVITWGKSSNPYVSFYLDKDGSAVFL |
| ADI242241 | Nt.BtsCI | 47 | >gi\|297185868\|gb\|ADI24224.1\| BtsCI top-strand nicking enzyme variant |
| | | | [synthetic construct] |
| | | | MKRILYLLTEERPKINIIHQIINLEYKATLHFGAKIVPVMNEENKFTFIYHVKGIEVEGFDAVLIKIVSG |
| | | | HSSFVDYLVFDSNDLKPEKNTITLFDLDQYELDLSYYFGKGWIVRIPSPSDLPKYVVFETKTDDHESRNT |
| | | | NAYQRSSKFVFCELYYGKEVKKYMLYDISDGRTLSGTDTHNFGMRMLVTNNVNLVGVPNMYLPFTDIKEF |
| | | | INEKNRIADNGPSHNVPIRLKLDKEKNVIYISAKLDKGNGKNKNKISNDPNIGAVAIISATLRNLNWKGD |
| | | | IEIINENLLPSSISSRSNGNKLLYIMKKLGVRFNNINVNWNNIKNNINYFFYNITSEKIVSIYYHLYVED |
| | | | KLSNARVIFDNHAGCGKSYFRTLNNKIIPVGKEIPLPDLVIFDSDQNIVKVIEAEKAENVYNGVEQLSTF |
| | | | DKFIESYINKYYPGAAVECSVITWGKSSNPYVSFYLDKDGSAVFL |
| | | | >gi\|85720924\|gb\|ABC75874.1\| R1.BtsI [Geobacillus thermoglucosidasius] |
| | | | MKITEGIVHVAMRHFLKSNGWKLIAGQYPGGSDDELTALNIVDPVVARDNSPDPRRHSLGKIVPDLIAYK |
| | | | NDDLLVIEAKPKYSQDDRDKLLYLLSERKHDFYAALEKFATERNHPELLPVSKLNIIPGLAFSASENKFK |
| | | | KDPGFVYIRVSGIFEAFMEGYDWG |
| ABC758741 | R1.BtsI | 48 | >gi\|85720924\|gb\|ABC75874.1\| R1.BtsI [Geobacillus thermoglucosidasius] |
| | | | MKITEGIVHVAMRHFLKSNGWKLIAGQYPGGSDDELTALNIVDPVVARDNSPDPRRHSLGKIVPDLIAYK |
| | | | NDDLLVIEAKPKYSQDDRDKLLYLLSERKHDFYAALEKFATERNHPELLPVSKLNIIPGLAFSASENKFK |
| | | | KDPGFVYIRVSGIFEAFMEGYDWG |
| ABC75876.1 | R2.BtsI | 49 | >gi\|85720926\|gb\|ABC75876.1\| R2.BtsI [Geobacillus thermoglucosidasius] |
| | | | MQIEQLMKSLTIYFDDIQEGLWFKNLHPLLESASLEAITGSLKRNPNLADVLKYDRPDIILTLNQTPILV |
| | | | IERTIEVPSGHNVGQRYGRLAAASEAGVPLVYFGPYAARKHGGATEGPRYMNLRLFYALDVMQKVNGSAI |
| | | | TTINWPVDQNFEILQDPSKDKRMKEYLEMFFDNLLKYGIAGINLAIRNSSFQAEQLAEREKFVETMITNP |
| | | | EQYDVPPDSVQILNAERFFNELGISENKRIICDEVVLYQVGMTYVRSDPYTGMALLYKYLYILGSERNRC |
| | | | LILKFPNITTDMWKKVAFGSRERKDVRIYRSVSDGILFADGYLSKEEL |
| AAX146521 | BbvCI | 50 | >gi\|60202520\|gb\|AAX14652.1\| BbvCI endonuclease subunit 1 |
| | subunit 1 | | [Brevibacillus brevis] |
| | | | MINEDFFIYEQLSHKKNLEQKGKNAFDEETEELVRQAKSGYHAFIEGINYDEVTKLDLNSSVAALEDYIS |
| | | | IAKEIEKKHKMFNWRSDYAGSIIPEFLYRIVHVATVKAGLKPIFSTRNTIIEISGAAHREGLQIRRKNED |
| | | | FALGFHEVDVKIASESHRVISLAVACEVKTNIDKNKLNGLDFSAERMKRTYPGSAYFLITETLDFSPDEN |
| | | | HSSGLIDEIYVLRKQVRTKNRVQKAPLCPSVFAELLEDILEISYRASNVKGHVYDRLEGGKLIRV |
| AAX146531 | BbvCI | 51 | >gi\|60202521\|gb\|AAX14653.1\| BbvCI endonuclease subunit 2 |
| | subunit 2 | | [Brevibacillus brevis] |
| | | | MFNQFNPLVYTHGGKLERKSKKDKTASKVFEEFGVMEAYNCWKEASLCIQQRDKDSVLKLVAALNTYKDA |
| | | | VEPIFDSRLNSAQEVLQPSILEEFFEYLFSRIDSIVGVNIPIRHPAKGYLSLSFNPHNIETLIQSPEYTV |
| | | | RAKDHDFIIGGSAKLTIQGHGGEGETTNIVVPAVAIECKRYLERNMLDECAGTAERLKRATPYCLYFVVA |
| | | | EYLKLDDGAPELTEIDEIYILRHQRNSERNKPGFKPNPIDGELIWDLYQEVMNHLGKIWWDPNSALQRGK |
| | | | VFNRP |
| CAA74998.1 | Bpu10I alpha | 52 | >gi\|2894388\|emb\|CAA74998.1\| Bpu10I restriction endonuclease alpha |
| | subunit | | subunit [Bacillus pumilus] |
| | | | MGVEQEWIKNITDMYQSPELIPSHASNLLHQLKREKRNEKLKKALEIITPNYISYISILLNNHNMTRKEI |
| | | | VILVDALNEYMNTLRHPSVKSVFSHQADFYSSVLPEFFNLLFRNLIKGLNEKIKVNSQKDIIIDCIFDPY |
| | | | NEGRVVFKKKRVDVAIILKNKFVFNNVEISDFAIPLVAIEIKTNLDKNMLSGIEQSVDSLKETFPLCLYY |
| | | | CITELADFAIEKQNYASTRIDEVFILRKQKRGPVARGTPLEVVHADLILEVVEQVGEHLSKFKDPIKTLK |
| | | | ARMTEGYLIKGKGK |
| CAA74999.1 | Bpu10I beta | 53 | >gi\|2894389\|emb\|CAA74999.1\| Bpu10I restriction endonuclease beta |
| | subunit | | subunit [Bacillus pumilus] |
| | | | MTQIDLSNTKHGSILFEKQKNVKEKYLQQAYKHYLYFRRSIDGLEITNDEAIFKLTQAANNYRDNVLYLF |
| | | | ESRPNSGQEAFRYTILEEFFYHLFKDLVKKKFNQEPSSIVMGKANSYVSLSFSPESFLGLYENPIPYIHT |
| | | | KDQDFVLGCAVDLKISPKNELNKENETEIVVPVIAIECKTYIERNMLDSCAATASRLKAAMPYCLYIVAS |
| | | | EYMKMDQAYPELTDIDEVFILCKASVGERTALKKKGLPPRKLDENLMVELFHMVERHLNRVWWSPNEALS |
| | | | RGRVIGRP |
| ABM69266.1 | BmrI | 54 | >gi\|123187377\|gb\|ABM69266.1\| BmrI [Bacillus megaterium] |
| | | | MNYFSLHPNVYATGRPKGLINMLESVWISNQKPGDGTMYLISGFANYNGGIRFYETFTEHINHGGKVIAI |
| | | | LGGSTSQRLSSKQVVAELVSRGVDVYIINRKRLLHAKLYGSSSNSGESLVVSSGNFTGPGMSQNVEASLL |
| | | | LDNNTTSSMGFSWNGMVNSMLDQKWQIHNLSNSNPTSPSWNLLYDERTTNLTLDDTQKVTLILTLGHADT |
| | | | ARIQAAPKSKAGEGSQYFWLSKDSYDFFPPLTIRNKRGTKATYSCLINMNYLDIKYIDSECRVTFEAENN |
| | | | FDFRLGTGKLRYTNVAASDDIAAITRVGDSDYELRIIKKGSSNYDALDSAAVNFIGNRGKRYGYIPNDEF |
| | | | GRIIGAKF |
| CAC12783.1 | BfiI | 55 | >gi\|10798463\|emb\|CAC12783.1\| restriction endonuclease BfiI [Bacillus |
| | | | firmus] |
| | | | MNFFSLHPNVYATGRPKGLIGMLENVWVSNHTPGEGTLYLISGFSNYNGGVRFYETFTEHINQGGRVIAI |
| | | | LGGSTSQRLSSRQVVEELLNRGVEVHIINRKRILHAKLYGTSNNLGESLVVSSGNFTGPGMSQNIEASLL |
| | | | LDNNTTQSMGFSWNDMISEMLNQNWHIHNMTNATDASPGWNLLYDERTTNLTLDETERVTLIVTLGHADT |
| | | | ARIQAAPGTTAGQGTQYFWLSKDSYDFFPPLTIRNRRGTKATYSSLINMNYIDINYTDTQCRVTFEAENN |
| | | | FDFRLGTGKLRYTGVAKSNDIAAITRVGDSDYELRIIKQGTPEHSQLDPYAVSFIGNRGKRFGYISNEEF |
| | | | GRIIGVTF |
| P05725.1 | 1-CreI | 1 | >gi\|140470\|sp\|P05725.1\|DNE1_CHLRE RecName: Full = DNA endonuclease I- |
| | | | CreI; AltName: Full = 23S rRNA intron protein |
| | | | MNTKYNKEFLLYLAGFVDGDGSIIAQIKPNQSYKFKHQLSLAFQVTQKTQRRWFLDKLVDEIGVGYVRDR |
| | | | GSVSDYILSEIKPLHNFLTQLQPFLKLKQKQANLVLKIIWRLPSAKESPDKFLEVCTWVDQIAALNDSKT |
| | | | RKTTSETVRAVLDSLSEKKKSSP |
| Q9UQ84.2 | ExoI | 56 | >gi\|85700954\|sp\|Q9UQ84.2\|EXO1_HUMAN RecName: Full = Exonuclease 1; |
| | (EXO1_HUMAN) | | Short = hExo1; AltName: Full = Exonuclease I; Short = hExoI |
| | | | MGIQGLLQFIKEASEPIHVRKYKGQVVAVDTYCWLHKGAIACAEKLAKGEPTDRYVGFCMKFVNMLLSHG |
| | | | IKPILVFDGCTLPSKKEVERSRRERRQANLLKGKQLLREGKVSEARECFTRSINITHAMAHKVIKAARSQ |
| | | | GVDCLVAPYEADAQLAYLNKAGIVQAIITEDSDLLAFGCKKVILKMDQFGNGLEIDQARLGMCRQLGDVF |
| | | | TEEKFRYMCILSGCDYLSSLRGIGLAKACKVLRLANNPDIVKVIKKIGHYLKMNITVPEDYINGFIRANN |
| | | | TFLYQLVFDPIKRKLIPLNAYEDDVDPETLSYAGQYVDDSIALQIALGEKDINTFEQIDDYNPDTAMPAH |
| | | | SRSHSWDDKTCQKSANVSSIWHRNYSPRPESGTVSDAPQLKENPSTVGVERVISTKGLNLPRKSSIVKRP |
| | | | RSAELSEDDLLSQYSLSETKKTKKNSSEGNKSLSFSEVFVPDLVNGPTNKKSVSTPPRTRNKFATFLQRK |
| | | | NEESGAVVVPGTRSRFFCSSDSTDCVSNKVSIQPLDETAVTDKENNLHESEYGDQEGKRLVDTDVARNSS |
| | | | DDIPNNHIPGDHIPDKATVFTDEESYSFESSKFTRTISPPTLGTLRSCFSWSGGLGDFSRTPSPSPSTAL |
| | | | QQFRRKSDSPTSLPENNMSDVSQLKSEESSDDESHPLREEACSSQSQESGEFSLQSSNASKLSQCSSKDS |
| | | | DSEESDCNIKLLDSQSDQTSKLRLSHFSKKDTPLRNKVPGLYKSSSADSLSTTKIKPLGPARASGLSKKP |
| | | | ASIQKRKHHNAENKPGLQIKLNELWKNFGFKKDSEKLPPCKKPLSPVRDNIQLTPEAEEDIFNKPECGRV |
| | | | QRAIFQ |
| P39875.2 | Yeast ExoI | 57 | >gi\|1706421\|sp\|P39875.2\|EXO1_YEAST RecName: Full = Exodeoxyribo- |
| | (EXO1_YEAST) | | nuclease 1; AltName: Full = Exodeoxyribonuclease I; Short = EXO I; |
| | | | Short = Exonuclease I; AltName: Full = Protein DHS1 |
| | | | MGIQGLLPQLKPIQNPVSLRRYEGEVLAIDGYAWLHRAACSCAYELAMGKPTDKYLQFFIKRFSLLKTFK |
| | | | VEPYLVEDGDAIPVKKSTESKARDKRKENKAIAERLWACGEKKNAMDYFQKCVDITPEMAKCIICYCKLN |
| | | | GIRYIVAPFEADSQMVYLEQKNIVQGIISEDSDLLVFGCRRLITKLNDYGECLEICRDNFIKLPKKFPLG |
| | | | SLTNEEIITMVCLSGCDYTNGIPKVGLITAMKLVRRFNTIERIILSIQREGKLMIPDTYINEYEAAVLAF |
| | | | QFQRVFCPIRKKIVSLNEIPLYLKDTESKRKRLYACIGFVIHRETQKKQIVHFDDDIDHHLHLKIAQGDL |
| | | | NPYDFHQPLANREHKLQLASKSNIEFGKTNTTNSEAKVKPIESFFQKMTKLDHNPKVANNIHSLRQAEDK |
| | | | LTMAIKRRKLSNANVVQETLKDTRSKFFNKPSMTVVENFKEKGDSIQDFKEDTNSQSLEEPVSESQLSTQ |
| | | | IPSSFITTNLEDDDELSEEVSEVVSDIEEDRKNSEGKTIGNEIYNTDDDGDGDTSEDYSETAESRVPTSS |
| | | | TTSFPGSSQRSISGCTKVLQKFRYSSSFSGVNANRQPLFPRHVNQKSRGMVYVNQNRDDDCDDNDGKNQI |
| | | | TQRPSLRKSLIGARSQRIVIDMKSVDERKSFESSPILHEESKKRDIETTKSSQARPAVRSISLLSQFVYK |
| | | | GK |
| BAJ43803.1 | E.coli ExoI | 58 | >gi\|315136644\|dbj\|BAJ43803.1\| exonuclease I [Escherichia coli DH1] |
| | | | MMNDGKQQSTFLFHDYETFGTHPALDRPAQFAAIRTDSEFNVIGEPEVFYCKPADDYLPQPGAVLITGIT |
| | | | PQEARAKGENEAAFAARIHSLFTVPKTCILGYNNVRFDDEVTRNIFYRNFYDPYAWSWQHDNSRWDLLDV |
| | | | MRACYALRPEGINWPENDDGLPSFRLEHLTKANGIEHSNAHDAMADVYATIAMAKLVKTRQPRLFDYLFT |
| | | | HRNKHKLMALIDVPQMKPLVHVSGMFGAWRGNTSWVAPLAWHPENRNAVIMVDLAGDISPLLELDSDTLR |
| | | | ERLYTAKTDLGDNAAVPVKLVHINKCPVLAQANTLRPEDADRLGINRQHCLDNLKILRENPQVREKVVAI |
| | | | FAEAEPFTPSDNVDAQLYNGFFSDADRAAMKIVLETEPRNLPALDITFVDKRIEKLLFNYRARNFPGTLD |
| | | | YAEQQRWLEHRRQVFTPEFLQGYADELQMLVQQYADDKEKVALLKALWQYAEEIV |
| Q913Q50.1 | Human TREX2 | 59 | >gi\|47606206\|sp\|Q913Q50.1\|TREX2_HUMAN RecName: Full = Three prime |
| | | | repair exonuclease 2; AltName: Full = 3′-5′ exonuclease TREX2 |
| | | | MGRAGSPLPRSSWPRMDDCGSRSRCSPTLCSSLRTCYPRGNITMSEAPRAETFVFLDLEATGLPSVEPEI |
| | | | AELSLFAVHRSSLENPEHDESGALVLPRVLDKLTLCMCPERPFTAKASEITGLSSEGLARCRKAGFDGAV |
| | | | VRTLQAFLSRQAGPICLVAHNGFDYDFPLLCAELRRLGARLPRDTVCLDTLPALRGLDRAHSHGTRARGR |
| | | | QGYSLGSLFHRYFRAEPSAAHSAEGDVHTLLLIFLHRAAELLAWADEQARGWAHIEPMYLPPDDPSLEA |
| Q91XB0.2 | Mouse TREX1 | 60 | >gi\|47606196\|sp\|Q91XB0.2\|TREX1_MOUSE RecName: Full = Three prime |
| | | | repair exonuclease 1; AltName: Full = 3′-5′ exonuclease TREX1 |
| | | | MGSQTLPHGHMQTLIFLDLEATGLPSSRPEVTELCLLAVHRRALENTSISQGHPPPVPRPPRVVDKLSLC |
| | | | IAPGKACSPGASEITGLSKAELEVQGRQRFDDNLAILLRAFLQRQPQPCCLVAHNGDRYDFPLLQTELAR |
| | | | LSTPSPLDGTFCVDSIAALKALEQASSPSGNGSRKSYSLGSIYTRLYWQAPTDSHTAEGDVLTLLSICQW |
| | | | KPQALLQWVDEHARPFSTVKPMYGTPATTGTTNLRPHAATATTPLATANGSPSNGRSRRPKSPPPEKVPE |
| | | | APSQEGLLAPLSLLTLLTLAIATLYGLFLASPGQ |
| Q9NSU2.1 | Human TREX1 | 61 | >gi\|47606216\|sp\|Q9NSU2.1\|TREX1_HUMAN RecName: Full = Three prime |
| | | | repair exonuclease 1; AltName: Full = 3′-5′ exonuclease TREX1; |
| | | | AltName: Full = DNase III |
| | | | MGPGARRQGRIVQGRPEMCFCPPPTPLPPLRILTLGTHTPTPCSSPGSAAGTYPTMGSQALPPGPMQTLI |
| | | | FEDMEATGLPFSQPKVTELCLLAVHRCALESPPTSQGPPPTVPPPPRVVDKLSLCVAPGKACSPAASEIT |
| | | | GLSTAVLAAHGRQCFDDNLANLLLAFLRRQPQPWCLVAHNGDRYDFPLLQAELAMLGLTSALDGAFCVDS |
| | | | ITALKALERASSPSEHGPRKSYSLGSIYTRLYGQSPPDSHTAEGDVLALLSICQWRPQALLRWVDAHARP |
| | | | FGTIRPMYGVTASARTKPRPSAVTTTAHLATTRNTSPSLGESRGTKDLPPVKDPGALSREGLLAPLGLLA |
| | | | ILTLAVATLYGLSLATPGE |
| Q9BG99.1 | Bovine TREX1 | 62 | >gi\|47606205\|sp\|Q9BG99.1\|TREX1_BOVIN RecName: Full = Three prime |
| | | | repair exonuclease 1; AltName: Full = 3′-5′ exonuclease TREX1 |
| | | | MGSRALPPGPVQTLIFLDLEATGLPFSQPKITELCLLAVHRYALEGLSAPQGPSPTAPVPPRVLDKLSLC |
| | | | VAPGKVCSPAASEITGLSTAVLAAHGRRAFDADLVNLIRTFLQRQPQPWCLVAHNGDRYDFPLLRAELAL |
| | | | LGLASALDDAFCVDSIAALKALEPTGSSSEHGPRKSYSLGSVYTRLYGQAPPDSHTAEGDVLALLSVCQW |
| | | | RPRALLRWVDAHAKPFSTVKPMYVITTSTGTNPRPSAVTATVPLARASDTGPNLRGDRSPKPAPSPKMCP |
| | | | GAPPGEGLLAPLGLLAFLTLAVAMLYGLSLAMPGQ |
| AAH91242.1 | Rat TREX1 | 63 | >gi\|60688197\|gb\|AAH91242.1\| Trex1 protein [Rattus norvegicus] |
| | | | MGSQALPHGHMQTLIFLDLEATGLPYSQPKITELCLLAVHRHALENSSMSEGQPPPVPKPPRVVDKLSLC |
| | | | IAPGKPCSSGASEITGLTTAGLEAHGRQRFNDNLATLLQVFLQRQPQPCCLVAHNGDRYDEPLLQAELAS |
| | | | LSVISPLDGTFCVDSIAALKTLEQASSPSEHGPRKSYSLGSIYTRLYGQAPTDSHTAEGDVLALLSICQW |
| | | | KPQALLQWVDKHARPFSTIKPMYGMAATTGTASPRLCAATTSSPLATANLSPSNGRSRGKRPTSPPPENV |
| | | | PEAPSREGLLAPLGLLTFLTLAIAVLYGIFLASPGQ |
| AAH63664.1 | Human DNA2 | 64 | >gi\|39793966\|gb\|AAH63664.1\| DNA2 protein [Homo sapiens] |
| | | | FAIPASRMEQLNELELLMEKSFWEEAELPAELFQKKVVASFPRTVLSTGMDNRYLVLAVNTVQNKEGNCE |
| | | | KRLVITASQSLENKELCILRNDWCSVPVEPGDIIHLEGDCTSDTWIIDKDFGYLILYPDMLISGTSIASS |
| | | | IRCMRRAVLSETFRSSDPATRQMLIGTVLHEVFQKAINNSFAPEKLQELAFQTIQEIRHLKEMYRLNLSQ |
| | | | DEIKQEVEDYLPSFCKWAGDFMHKNTSTDFPQMQLSLPSDNSKDNSTCNIEVVKPMDIEESIWSPRFGLK |
| | | | GKIDVTVGVKIHRGYKTKYKIMPLELKTGKESNSIEHRSQVVLYTLLSQERRADPEAGLLLYLKTGQMYP |
| | | | VPANHLDKRELLKLRNQMAFSLFHRISKSATRQKTQLASLPQIIEEEKTCKYCSQIGNCALYSRAVEQQM |
| | | | DCSSVPIVMLPKIEEETQHLKQTHLEYFSLWCLMLTLESQSKDNKKNHQNIWLMPASEMEKSGSCIGNLI |
| | | | RMEHVKIVCDGQYLHNFQCKHGAIPVTNLMAGDRVIVSGEERSLFALSRGYVKEINMTTVTCLLDRNLSV |
| | | | LPESTLFRLDQEEKNCDIDTPLGNLSKLMENTFVSKKLRDLIIDFREPQFISYLSSVLPHDAKDTVACIL |
| | | | KGLNKPQRQAMKKVLLSKDYTLIVGMPGTGKTTTICTLVPAPEQVEKGGVSNVTEAKLIVELTSIFVKAG |
| | | | CSPSDIGIIAPYRQQLKIINDLLARSIGMVEVNTVDKYQGRDKSIVLVSFVRSNKDGTVGELLKDWRRLN |
| | | | VAITRAKHKLILLGCVPSLNCYPPLEKLLNHLNSEKLIIDLPSREHESLCHILGDFQRE |
| P38859.1 | Yeast DNA2 | 65 | >gi\|731738\|sp\|P38859.1\|DNA2_YEAST RecName: Full = DNA replication ATP- |
| | (DNA2_YEAST) | | dependent helicase DNA2 |
| | | | MPGTPQKNKRSASISVSPAKKTEEKEIIQNDSKAILSKQTKRKKKYAFAPINNLNGKNTKVSNASVLKSI |
| | | | AVSQVRNTSRTKDINKAVSKSVKQLPNSQVKPKREMSNLSRHHDFTQDEDGPMEEVIWKYSPLQRDMSDK |
| | | | TTSAAEYSDDYEDVQNPSSTPIVPNRLKTVLSFTNIQVPNADVNQLIQENGNEQVRPKPAEISTRESLRN |
| | | | IDDILDDIEGDLTIKPTITKFSDLPSSPIKAPNVEKKAEVNAEEVDKMDSTGDSNDGDDSLIDILTQKYV |
| | | | EKRKSESQITIQGNTNQKSGAQESCGKNDNTKSRGEIEDHENVDNQAKTGNAFYENEEDSNCQRIKKNEK |
| | | | IEYNSSDEFSDDSLIELLNETQTQVEPNTIEQDLDKVEKMVSDDLRIATDSTLSAYALRAKSGAPRDGVV |
| | | | RLVIVSLRSVELPKIGTQKILECIDGKGEQSSVVVREPWVYLEFEVGDVIHIIEGKNIENKRLLSDDKNP |
| | | | KTQLANDNLLVLNPDVLFSATSVGSSVGCLRRSILQMQFQDPRGEPSLVMTLGNIVHELLQDSIKYKLSH |
| | | | NKISMEIIIQKLDSLLETYSFSIIICNEEIQYVKELVMKEHAENILYFVNKFVSKSNYGCYTSISGTRRT |
| | | | QPISISNVIDIEENIWSPIYGLKGFLDATVEANVENNKKHIVPLEVKTGKSRSVSYEVQGLIYTLLLNDR |
| | | | YEIPIEFFLLYFTRDKNMTKFPSVLHSIKHILMSRNRMSMNFKHQLQEVFGQAQSRFELPPLLRDSSCDS |
| | | | CFIKESCMVLNKLLEDGTPEESGLVEGEFEILTNHLSQNLANYKEFFTKYNDLITKEESSITCVNKELFL |
| | | | LDGSTRESRSGRCLSGLVVSEVVEHEKTEGAYIYCFSRRANDNNSQSMLSSQIAANDEVIISDEEGHFCL |
| | | | CQGRVQFINPAKIGISVKRKLLNNRLLDKEKGVTTIQSVVESELEQSSLIATQNLVTYRIDKNDIQQSLS |
| | | | LARFNLLSLFLPAVSPGVDIVDERSKLCRKTKRSDGGNEILRSLLVDNRAPKFRDANDDPVIPYKLSKDT |
| | | | TLNLNQKEAIDKVMRAEDYALILGMPGTGKTTVIAEIIKILVSEGKRVLLTSYTHSAVDNILIKLRNTNI |
| | | | SIMRLGMKHKVHPDTQKYVPNYASVKSYNDYLSKINSTSVVATTCLGINDILFTLNEKDFDYVILDEASQ |
| | | | ISMPVALGPLRYGNRFIMVGDHYQLPPLVKNDAARLGGLEESLFKTFCEKHPESVAELTLQYRMCGDIVT |
| | | | LSNFLIYDNKLKCGNNEVFAQSLELPMPEALSRYRNESANSKQWLEDILEPTRKVVFLNYDNCPDIIEQS |
| | | | EKDNITNHGEAELTLQCVEGMLLSGVPCEDIGVMTLYRAQLRLLKKIFNKNVYDGLEILTADQFQGRDKK |
| | | | CIIISMVRRNSQLNGGALLKELRRVNVAMTRAKSKLIIIGSKSTIGSVPEIKSFVNLLEERNWVYTMCKD |
| | | | ALYKYKFPDRSNAIDEARKGCGKRTGAKPITSKSKFVSDKPIIKEILQEYES |
| AAA45863.1 | VP16 | 66 | >gi\|330318\|gb\|AAA45863.1\| VP16 [Human herpesvirus 2] |
| | | | MDLLVDDLFADRDGVSPPPPRPAGGPKNTPAAPPLYATGRLSQAQLMPSPPMPVPPAALFNRLLDDLGFS |
| | | | AGPALCTMLDTWNEDLFSGFPTNADMYRECKFLSTLPSDVIDWGDAHVPERSPIDIRAHGDVAFPTLPAT |
| | | | RDELPSYYEAMAQFFRGELRAREESYRTVLANFCSALYRYLRASVRQLHRQAHMRGRNRDLREMLRTTIA |
| | | | DRYYRETARLARVLFLHLYLFLSREILWAAYAEQMMRPDLFDGLCCDLESWRQLACLFQPLMFINGSLTV |
| | | | RGVPVEARRLRELNHIREHLNLPLVRSAAAEEPGAPLTTPPVLQGNQARSSGYFMLLIRAKLDSYSSVAT |
| | | | SEGESVMREHAYSRGRTRNNYGSTIEGLLDLPDDDDAPAEAGLVAPRMSFLSAGQRPRRLSTTAPITDVS |
| | | | LGDELRLDGEEVDMTPADALDDFDLEMLGDVESPSPGMTHDPVSYGALDVDDFEFEQMFTDAMGIDDFGG |
| ACM07430.1 | Colicin E9 | 366 | >gi\|221185856\|gb\|ACM07430.1\| colicin E9 [Escherichia coli] |
| | | | MSGGDGRGHNTGAHSTSGNINGGPTGIGVSGGASDGSGWSSENNPWGGGSGSGIHWGGGSGRGNGGGNGN |
| | | | SGGGSGTGGNLSAVAAPVAFGFPALSTPGAGGLAVSISASELSAAIAGIIAKLKKVNLKFTPFGVVLSSL |
| | | | IPSEIAKDDPNMMSKIVTSLPADDITESPVSSLPLDKATVNVNVRVVDDVKDERQNISVVSGVPMSVPVV |
| | | | DAKPTERPGVFTASIPGAPVLNISVNDSTPAVQTLSPGVTNNTDKDVRPAGFTQGGNTRDAVIRFPKDSG |
| | | | HNAVYVSVSDVLSPDQVKQRQDEENRRQQEWDATHPVEAAERNYERARAELNQANEDVARNQERQAKAVQ |
| | | | VYNSRKSELDAANKTLADAIAEIKQFNRFAHDPMAGGHRMWQMAGLKAQRAQTDVNNKQAAFDAAAKEKS |
| | | | DADAALSAAQERRKQKENKEKDAKDKLDKESKRNKPGKATGKGKPVGDKWLDDAGKDSGAPIPDRIADKL |
| | | | RDKEEKSFDDFRKAVWEEVSKDPELSKNLNPSNKSSVSKGYSPFTPKNQQVGGRKVYELHHDKPISQGGE |
| | | | VYDMDNIRVTTPKRHIDIHRGK |
| NP_775816.1 | APFL | 367 | >gi\|135233\|sp\|P14870.1\|T2F1_PLAOK RecName: Full = Type-2 restriction |
| | | | enzyme FokI; Short = R.FokI; AltName: Full = Endonuclease FokI; |
| | | | AltName: Full = Type II restriction enzyme FokI; AltName: Full = Type |
| | | | IIS restriction enzyme FokI |
| | | | MFLSMVSKIRTFGWVQNPGKFENLKRVVQVFDRNSKVHNEVKNIKIPTLVKESKIQKELVAIMNQHDLIY |
| | | | TYKELVGTGTSIRSEAPCDAIIQATIADQGNKKGYIDNWSSDGFLRWAHALGFIEYINKSDSFVITDVGL |
| | | | AYSKSADGSAIEKEILIEAISSYPPAIRILTLLEDGQHLTKFDLGKNLGFSGESGFTSLPEGILLDTLAN |
| | | | AMPKDKGEIRNNWEGSSDKYARMIGGWLDKLGLVKQGKKEFIIPTLGKPDNKEFISHAFKITGEGLKVLR |
| | | | RAKGSTKFTRVPKRVYWEMLATNLTDKEYVRTRRALILEILIKAGSLKIEQIQDNLKKLGFDEVIETIEN |
| | | | DIKGLINTGIFIEIKGRFYQLKDHILQFVIPNRGVTKQLVKSELEEKKSELRHKLKYVPHEYIELIEIAR |
| | | | NSTQDRILEMKVMEFFMKVYGYRGKHLGGSRKPDGAIYTVGSPIDYGVIVDTKAYSGGYNLPIGQADEMQ |
| | | | RYVEENQTRNKHINPNEWWKVYPSSVTEFKFLFVSGHFKGNYKAQLTRLNHITNCNGAVLSVEELLIGGE |
| | | | MIKAGTLTLEEVRRKFNNGEINF |
| P14870.1 | Fold | 368 | >gi\|221185857\|gb\|ACM07431.1\| colicin E9 immunity protein [Escherichia |
| | | | coli] |
| | | | MELKHSISDYTEAEFLQLVTTICNADISSEEELVKLVTHFEEMTEHPSGSDLIYYPKEGDDDSPSGIVNT |
| | | | VKQWRAANGKSGFKQG |

[0084] In another preferred embodiment according to the method of the present invention, the peptidic linker that can link said catalytic domain to the core TALE scaffold according to the method of the present invention can be selected from the group consisting of NFS1, NFS2, CFS1, RM2, BQY, QGPSG, LGPDGRKA, 1a8h_{—}1, 1dnpA_{—}1, 1d8cA_{—}2, 1ckqA_{—}3, 1sbp_{—}1, 1ev7A_{—}1, 1alo_{—}3, 1amf_{—}1, 1adjA_{—}3, 1fcdC_{—}1, 1a13_{—}2, 1g3p_{—}1, 1acc_{—}3, 1ahjB_{—}1, 1acc_{—}1, 1af7_{—}1, 1heiA_{—}1, 1bia_{—}2, 1igtB_{—}1, 1nfkA_{—}1, 1au7A_{—}1, 1 bpoB_{—}1, 1b0pA_{—}2, 1c05A_{—}2, 1gcb_{—}1, 1bt3A_{—}1, 1b3o8_{—}2, 16vpA_{—}6, 1dhx_{—}1, 1b8aA_{—}1 and 1qu6A_{—}1, as listed in Table 3 (SEQ ID NO: 67 to SEQ ID NO: 104 and SEQ ID NO: 372 to SEQ ID NO: 415). In a more preferred embodiment, the peptidic linker that can link said catalytic domain to the core TALE scaffold according to the method of the present invention can be selected from the group consisting of NFS1 (SEQ ID NO: 98), NFS2 (SEQ ID NO: 99) and CFS1 (SEQ ID NO: 100). In the scope of the present invention is also encompassed the case where a peptidic linker is not needed to fuse a catalytical domain to the TALE scaffold in order to obtain a cTALEN according to the present invention.

TABLE 3
List of peptidic linkers that can be used in compact TALENs or enhanced
compact TALENs.

| | Amino | | | | SEQ ID |
|---|---|---|---|---|---|
| Name (PDB) | Acids | Size | Length | Sequence | NO |
| 1a8h_1 | 285-287 | 3 | 6,636 | NVG | 67 |
| 1dnpA_1 | 130-133 | 4 | 7,422 | DSVI | 68 |
| 1d8cA_2 | 260-263 | 4 | 8,782 | IVEA | 69 |
| 1ckqA_3 | 169-172 | 4 | 9,91 | LEGS | 70 |
| 1sbp_1 | 93-96 | 4 | 10,718 | YTST | 71 |
| 1ev7A_1 | 169-173 | 5 | 11,461 | LQENL | 72 |
| 1alo_3 | 360-364 | 5 | 12,051 | VGRQP | 73 |
| 1amf_1 | 81-85 | 5 | 13,501 | LGNSL | 74 |
| 1adjA_3 | 323-328 | 6 | 14,835 | LPEEKG | 75 |
| 1fcdC_1 | 76-81 | 6 | 14,887 | QTYQPA | 76 |
| 1al3_2 | 265-270 | 6 | 15,485 | FSHSTT | 77 |
| 1g3p_1 | 99-105 | 7 | 17,903 | GYTYINP | 78 |
| 1acc_3 | 216-222 | 7 | 19,729 | LTKYKSS | 79 |
| 1ahjB_1 | 106-113 | 8 | 17,435 | SRPSESEG | 80 |
| 1acc_1 | 154-161 | 8 | 18,776 | PELKQKSS | 81 |
| 1af7_1 | 89-96 | 8 | 22,502 | LTTNLTAF | 82 |
| 1heiA_1 | 322-330 | 9 | 13,534 | TATPPGSVT | 83 |
| 1bia_2 | 268-276 | 9 | 16,089 | LDNFINRPV | 84 |
| 1igtB_1 | 111-119 | 9 | 19,737 | VSSAKTTAP | 85 |
| 1nfkA_1 | 239-248 | 10 | 13,228 | DSKAPNASNL | 86 |
| 1au7A_1 | 103-112 | 10 | 20,486 | KRRTTISIAA | 87 |
| 1bpoB_1 | 138-148 | 11 | 21,645 | PVKMFDRHSSL | 88 |
| 1b0pA_2 | 625-635 | 11 | 26,462 | APAETKAEPMT | 89 |
| 1c05A_2 | 135-148 | 14 | 23,819 | YTRLPERSELPAEI | 90 |
| 1gcb_1 | 57-70 | 14 | 27,39 | VSTDSTPVTNQKSS | 91 |
| 1bt3A_1 | 38-51 | 14 | 28,818 | YKLPAVTTMKVRPA | 92 |
| 1b3oB_2 | 222-236 | 15 | 20,054 | IARTDLKKNRDYPLA | 93 |
| 16vpA_6 | 312-332 | 21 | 23,713 | TEEPGAPLTTPPTLHGNQARA | 94 |
| 1dhx_1 | 81-101 | 21 | 42,703 | ARFTLAVGDNRVLDMASTYFD | 95 |
| 1b8aA_1 | 95-120 | 26 | 31,305 | IVVLNRAETPLPLDPTGKVKAELDTR | 96 |
| 1qu6A_1 | 79-106 | 28 | 51,301 | ILNKEKKAVSPLLLTTTNSSEGLSMGNY | 97 |
| NFS1 | — | 20 | — | GSDITKSKISEKMKGQGPSG | 98 |
| NFS2 | — | 23 | — | GSDITKSKISEKMKGLGPDGRKA | 99 |
| CFS1 | — | 10 | — | SLTKSKISGS | 100 |
| RM2 | — | 32 | — | AAGGSALTAGALSLTAGALSLTAGALSGGGGS | 101 |
| BQY | — | 25 | — | AAGASSVSASGHIAPLSLPSSPPSVGS | 102 |
| QGPSG | — | 5 | — | QGPSG | 103 |
| LGPDGRKA | — | 8 | — | LGPDGRKA | 104 |
| TAL1 | — | 15 | — | SGGSGSNVGSGSGSG | 372 |
| TAL2 | — | 20 | — | SGGSGSLTTNLTAFSGSGSG | 373 |
| TAL3 | — | 22 | — | SGGSGSKRRTTISIAASGSGSG | 374 |
| TAL4 | — | 17 | — | SGGSGSVGRQPSGSGSG | 375 |
| TAL5 | — | 26 | — | SGGSGSYTRLPERSELPAEISGSGSG | 376 |
| TAL6 | — | 38 | — | SGGSGSIVVLNRAETPLPLDPTGKVKAELDTRSGSGSG | 377 |
| TAL7 | — | 21 | — | SGGSGSTATPPGSVTSGSGSG | 378 |
| TAL8 | — | 21 | — | SGGSGSLDNFINRPVSGSGSG | 379 |
| TAL9 | — | 21 | — | SGGSGSVSSAKTTAPSGSGSG | 380 |
| TAL10 | — | 22 | — | SGGSGSDSKAPNASNLSGSGSG | 381 |
| TAL11 | — | 23 | — | SGGSGSPVKMFDRHSSLSGSGSG | 382 |
| TAL12 | — | 23 | — | SGGSGSAPAETKAEPMTSGSGSG | 383 |
| TAL13 | — | 26 | — | SGGSGSVSTDSTPVTNQKSSSGSGSG | 384 |
| TAL14 | — | 16 | — | SGGSGSDSVISGSGSG | 385 |
| TAL15 | — | 33 | — | SGGSGSARFTLAVGDNRVLDMASTYFDSGSGSG | 386 |
| TAL16 | — | 17 | — | SGGSGSLQENLSGSGSG | 387 |
| TAL17 | — | 19 | — | SGGSGSGYTYINPSGSGSG | 388 |
| TAL18 | — | 26 | — | SGGSGSYKLPAVITMKVRPASGSGSG | 389 |
| TAL19 | — | 16 | — | SGGSGSLEGSSGSGSG | 390 |
| TAL20 | — | 16 | — | SGGSGSIVEASGSGSG | 391 |
| TAL21 | — | 18 | — | SGGSGSQTYQPASGSGSG | 392 |
| TAL22 | — | 27 | — | SGGSGSIARTDLKKNRDYPLASGSGSG | 393 |
| TAL23 | — | 18 | — | SGGSGSLPEEKGSGSGSG | 394 |
| TAL24 | — | 16 | — | SGGSGSYTSTSGSGSG | 395 |
| TAL25 | — | 20 | — | SGGSGSSRPSESEGSGSGSG | 396 |
| TAL26 | — | 17 | — | SGGSGSLGNSLSGSGSG | 397 |
| TAL27 | — | 19 | — | SGGSGSLTKYKSSSGSGSG | 398 |
| TAL28 | — | 33 | — | SGGSGSTEEPGAPLTTPPTLHGNQARASGSGSG | 399 |
| TAL29 | — | 18 | — | SGGSGSFSHSTTSGSGSG | 400 |
| TAL30 | — | 20 | — | SGGSGSPELKQKSSSGSGSG | 401 |
| TAL31 | — | 40 | — | SGGSGSILNKEKKAVSPLIITTINSSEGLSMGNYSGSGSG | 402 |
| TAL32 | — | 31 | — | ELAEFHARYADLLLRDLRERPVSLVRGPDSG | 403 |
| TAL33 | — | 31 | — | ELAEFHARPDPLLLRDLRERPVSLVRGLGSG | 404 |
| TAL34 | — | 26 | — | ELAEFHARYADLLLRDLRERSGSGSG | 405 |
| TAL35 | — | 31 | — | DIFDYYAGVAEVMLGHIAGRPATRKRWPNSG | 406 |
| TAL36 | — | 31 | — | DIFDYYAGPDPVMLGHIAGRPATRKRWLGSG | 407 |
| TAL37 | — | 26 | — | DIFDYYAGVAEVMLGHIAGRSGSGSG | 408 |
| Linker A | | 37 | | SIVAQLSRPDPALVSFQKLKLACLGGRPALDAVKKGL | 409 |
| Linker B | | 37 | | SIVAQLSRPDPAAVSAQKAKAACLGGRPALDAVKKGL | 410 |
| Linker C | | 37 | | SIVAQLSRPDPAVVTFHKLKLACLGGRPALDAVKKGL | 411 |
| Linker D | | 44 | | SIVAQLSRPDPAQSLAQELSLNESQIKIACLGGRPALDAVKKGL | 412 |
| Linker E | | 40 | | SIVAQLSRPDPALQLPPLERLTLDACLGGRPALDAVKKGL | 413 |
| Linker F | | 38 | | SIVAQLSRPDPAIHKKFSSIQMACLGGRPALDAVKKGL | 414 |
| Linker G | | 40 | | SIVAQLSRPDPAAAAATNDHAVAAACLGGRPALDAVKKGL | 415 |

[0085] Depending from its structural composition [type of core TALE scaffold, type of catalytic domain(s) with associated enzymatic activities and eventually type of linker(s)], a compact TALEN according to the present invention can comprise different levels of separate enzymatic activities able to differently process DNA, resulting in a global DNA processing efficiency for said compact TALEN, each one of said different enzymatic activities having their own DNA processing efficiency.

[0086] In another preferred embodiment, the method according to the present invention further comprises the steps of:
[0087] (i) Engineering at least one enhancer domain;
[0088] (ii) Optionally determining or engineering one peptide linker to fuse said enhancer domain to one part of said compact TALEN entity;
   thereby obtaining a compact TALEN entity with enhanced DNA processing efficiency nearby a single double-stranded DNA target sequence of interest, i.e. an enhanced compact TALEN.

[0089] In other words, according to the method of the present invention said unique compact TALEN monomer further comprises:
[0090] (i) At least one enhancer domain;
[0091] (ii) Optionally one peptide linker to fuse said enhancer domain to one part of said unique compact TALEN monomer active entity.

[0092] In another more preferred embodiment, said enhancer domain is fused to the N-terminus of the core TALE scaffold part of said compact TALEN entity. In another more preferred embodiment, said enhancer domain is fused to C-terminus of the core TALE scaffold part of said compact TALEN entity. In another more preferred embodiment, said enhancer domain is fused to the catalytic domain part of said compact TALEN entity. In another more preferred embodiment, said enhancer domain is fused between the N-terminus of the core TALE scaffold part and the catalytic part of said compact TALEN entity. In another more preferred embodiment, said enhancer domain is fused between the C-terminus of the core TALE scaffold part and the catalytic part of said compact TALEN entity. In the scope of the present invention, it can be envisioned to insert said catalytic domain and/or enhancer domain between two parts of the engineered core TALE scaffold according to the invention, each part comprising one set of RVDs. In this last case, the number of RVDs for each engineered core TALE scaffold can be the same or not. In other words, it can be envisioned to split said core TALE scaffold of the present invention to insert one catalytic domain and/or one enhancer domain between the resulting two parts of said engineered core TALE scaffold.

[0093] In another preferred embodiment, said enhancer domain is catalytically active or not, providing functional and/or structural support to said compact TALEN entity. In a more preferred embodiment, said enhancer domain consists of a protein domain selected from the group consisting of MmeI, Colicin-E7 (CEA7_ECOLX), Colicin-E9, APFL, EndA, Endo I (END1_ECOLI), Human Endo G (NUCG_HUMAN), Bovine Endo G (NUCG_BOVIN), R.HinP1I, I-BasI, I-BmoI, I-HmuI, I-TevI, I-TevII, I-TevIII, I-TwoI, R.MspI, R.MvaI, NucA, NucM, Vvn, Vvn_CLS, Staphylococcal nuclease (NUC_STAAU), Staphylococcal nuclease (NUC_STAHY), Micrococcal nuclease (NUC_SHIFL), Endonuclease yncB, Endodeoxyribonuclease I (ENRN_BPT7), Metnase, Nb.BsrDI, BsrDI A, Nt.BspD6I (R.BspD6I large subunit), ss.BspD6I (R.BspD6I small subunit), R.PleI, MlyI, AlwI, Mva1269I, BsrI, BsmI, Nb.BtsCI, Nt.BtsCI, R1.BtsI, R2.BtsI, BbvCI subunit 1, BbvCI subunit 2, Bpu10I alpha subunit, Bpu10I beta subunit, BmrI, BfiI, I-CreI, hExol (EXO1_HUMAN), Yeast Exol (EXO1_YEAST), E. coli Exol, Human TREX2, Mouse TREX1, Human TREX1, Bovine TREX1, Rat TREX1, Human DNA2, Yeast DNA2 (DNA2_YEAST) and VP16, as listed in Table 2 (SEQ ID NO: 10 to SEQ ID NO: 66 and SEQ ID NO: 1, 366 & 367, a functional mutant, a variant or a derivative thereof. In another more preferred embodiment, said enhancer domain consists of a catalytically active derivative of the protein domains listed above and in Table 2, providing functional and/or structural support to said compact TALEN entity. In another preferred embodiment, said enhancer domain consists of a catalytically inactive derivative of the protein domains listed above and in Table 2, providing structural support to said compact TALEN entity. In another preferred embodiment, said enhancer domain is selected from the group consisting of I-TevI (SEQ ID NO: 20), ColE7 (SEQ ID NO: 11) and NucA (SEQ ID NO: 26).

[0094] In a more preferred embodiment, said enhanced compact TALEN according to the method of the present invention can comprise a second enhancer domain. In this embodiment, said second enhancer domain can have the same characteristics than the first enhancer domain. In a more preferred embodiment, said second enhancer domain provides structural support to enhanced compact TALEN entity. In another more preferred embodiment, said second enhancer domain provides functional support to enhanced compact TALEN entity. In a more preferred embodiment, said second enhancer domain provides structural and functional support to the enhanced compact TALEN entity. In a more preferred embodiment, said enhanced compact TALEN entity comprises one catalytic domain and one enhancer domain. In another more preferred embodiment said enhanced compact TALEN entity comprises one catalytic domain and two enhancer domains. In another more preferred embodiment said enhanced compact TALEN entity comprises two catalytic domains and one enhancer domains. In another more preferred embodiment said enhanced compact TALEN entity comprises two catalytic domains and two enhancer domains.

[0095] In a more preferred embodiment, said second enhancer domain consists of a protein domain derived from a protein selected from the group consisting of MmeI, Colicin-E7 (CEA7_ECOLX), Colicin-E9, APFL, EndA, Endo I (END1_ECOLI), Human Endo G (NUCG_HUMAN), Bovine Endo G (NUCG_BOVIN), R.HinP1I, I-BasI, I-BmoI, I-HmuI, I-TevI, I-TevII, I-TevIII, I-TwoI, R.MspI, R.MvaI, NucA, NucM, Vvn, Vvn_CLS, Staphylococcal nuclease (NUC_STAAU), Staphylococcal nuclease (NUC_STAHY), Micrococcal nuclease (NUC_SHIFL), Endonuclease yncB, Endodeoxyribonuclease I (ENRN_BPT7), Metnase, Nb.BsrDI, BsrDI A, Nt.BspD6I (R.BspD6I large subunit), ss.BspD6I (R.BspD6I small subunit), R.PleI, MlyI, AiwI, Mva12691, BsrI, BsmI, Nb.BtsCI, Nt.BtsCI, R1.BtsI, R2.BtsI, BbvCI subunit 1, BbvCI subunit 2, Bpu10I alpha subunit, Bpu10I beta subunit, BmrI, BfiI, I-CreI, hExol (EXO1_HUMAN), Yeast Exol (EXO1_YEAST), E. coli Exol, Human TREX2, Mouse TREX1, Human TREX1, Bovine TREX1, Rat TREX1, Human DNA2, Yeast DNA2 (DNA2_YEAST) and VP16, as listed in Table 2 (SEQ ID NO: 10 to SEQ ID NO: 66 and SEQ ID NO: 1, 366 & 367, a functional mutant, a variant or a derivative thereof. In another more preferred embodiment, said second enhancer domain consists of a catalytically active derivative of the protein domains listed above and in Table 2, providing functional and/or structural support to said enhanced compact TALEN entity. In another preferred embodiment, said second enhancer domain consists of a catalytically inactive derivative of the protein domains listed above and in Table 2, providing structural support to said enhanced compact TALEN entity.

[0096] In another more preferred embodiment, any combinations of catalytic and/or enhancer domains listed above, as non-limiting examples, can be envisioned to be fused to said core TALE scaffold providing structural and/or functional support to said compact TALEN entity. More preferably, combinations of catalytic domains selected from the group of TevI (SEQ ID NO: 20), ColE7 (SEQ ID NO: 11) and NucA (SEQ ID NO: 26) can be envisioned. Optionally, FokI (SEQ ID NO: 368) can be used in combination with another catalytic domain according to the list of Tablet. Such combinations of catalytic and/or enhancer domains can be envisioned regarding the envisioned applications for using the method of the present invention.

[0097] Depending from its structural composition [type of core TALE scaffold, type of catalytic domain(s) with associated enzymatic activities, eventually type of linker(s) and type of enhancer(s) domains], an enhanced compact TALEN according to the present invention can present different levels of separate enzymatic activities able to differently process DNA, resulting in a global DNA processing efficiency for said enhanced compact TALEN, each one of said different enzymatic activities having their own DNA processing efficiency.

[0098] In this preferred embodiment, the DNA processing efficiency of the compact TALEN entity according to the method of the present invention can be enhanced by the engineering of at least one enhancer domain and one peptidic linker thereby obtaining a compact TALEN entity with enhanced DNA processing activity nearby a single double-stranded DNA target sequence of interest, i.e. a enhanced compact TALEN according to the present invention.

[0099] Depending on its structural composition, the global DNA processing efficiency that is enhanced in said enhanced compact TALEN according to the present invention, can have a dominant enzymatic activity selected from the group consisting of a nuclease activity, a polymerase activity, a kinase activity, a phosphatase activity, a methylase activity, a topoisomerase activity, an integrase activity, a transposase activity or a ligase activity as non-limiting examples. In a more preferred embodiment, the global DNA processing efficiency that is enhanced in said enhanced compact TALEN according to the present invention is a combination of different enzymatic activities selected from the group consisting of a nuclease activity, a polymerase activity, a kinase activity, a phosphatase activity, a methylase activity, a topoisomerase activity, an integrase activity, a transposase activity or a ligase activity as non-limiting examples. In a more preferred embodiment, the global DNA processing efficiency that is enhanced in said enhanced compact TALEN according to the present invention is one of its different enzymatic activities selected from the group consisting of a nuclease activity, a polymerase activity, a kinase activity, a phosphatase activity, a methylase activity, a topoisomerase activity, an integrase activity, a transposase activity or a ligase activity as non-limiting examples. In this case, the global DNA processing efficiency is equivalent to one DNA processing activity amongst the enzymatic activities mentioned above. In another more preferred embodiment, said DNA processing activity of the compact TALEN entity which is enhanced by the enhancer is a cleavase activity or a nickase activity or a combination of both a cleavase activity and a nickase activity.

[0100] Enhancement of DNA processing efficiency of a compact TALEN entity according to the present invention can be a consequence of a structural support by at least one enhancer domain. In a preferred embodiment, said structural support enhances the binding of a compact TALEN entity according to the invention for said DNA target sequence compared to the binding of a starting compact TALEN entity for the same DNA target sequence, thereby indirectly assisting the catalytic domain(s) to obtain a compact TALEN entity with enhanced DNA processing activity. In another preferred embodiment, said structural support enhances the existing catalytical activity of a compact TALEN entity for a DNA target sequence compared to the binding of a starting compact TALEN entity for the same DNA target sequence to obtain a compact TALEN entity with enhanced DNA processing activity.

[0101] In another preferred embodiment, said enhancer according to the method of the present invention both enhances the binding of the compact TALEN entity for said DNA target sequence and the catalytic activity of the catalytic domain(s) to obtain a compact TALEN entity with enhanced DNA processing activity. All these non-limiting examples lead to a compact TALEN entity with enhanced DNA processing efficiency for a DNA target sequence at a genomic locus of interest, i.e. an enhanced compact TALEN according to the present invention.

[0102] Enhancement of DNA processing efficiency of a compact TALEN entity according to the present invention, compared to a starting compact TALEN entity, can also be a consequence of a fuctional support by at least one enhancer domain. In a preferred embodiment, said functional support can be the consequence of the hydrolysis of additional phosphodiester bonds. In a more preferred embodiment, said functional support can be the hydrolysis of additional phosphodiester bonds by a protein domain derived from a nuclease. In an embodiment, said functional support can be the hydrolysis of additional phosphodiester bonds by a protein domain derived from an endonuclease. In a more preferred embodiment, said functional support can be the hydrolysis of additional phosphodiester bonds by a protein domain derived from a cleavase. In another more preferred embodiment, said functional support can be the hydrolysis of additional phosphodiester bonds by a protein domain derived from a nickase. In a more preferred embodiment, said functional support can be the hydrolysis of additional phosphodiester bonds by a protein domain derived from an exonuclease.

[0103] In genome engineering experiments, the efficiency of rare-cutting endonuclease, e.g. their ability to induce a desired event (Homologous gene targeting, targeted mutagenesis, sequence removal or excision) at a locus, depends on several parameters, including the specific activity of the nuclease, probably the accessibility of the target, and the efficacy and outcome of the repair pathway(s) resulting in the desired event (homologous repair for gene targeting, NHEJ pathways for targeted mutagenesis).

[0104] Cleavage by peptidic rare cutting endonucleases usually generates cohesive ends, with 3′ overhangs for LAGLIDADG meganucleases (Chevalier and Stoddard 2001) and 5′ overhangs for Zinc Finger Nucleases (Smith, Bibikova et al. 2000). These ends, which result from hydrolysis of phosphodiester bonds, can be re-ligated in vivo by NHEJ in a seamless way (i.e. a scarless re-ligation). The restoration of a cleavable target sequence allows for a new cleavage event by the same endonuclease, and thus, a series of futile cycles of cleavage and re-ligation events can take place. Indirect evidences have shown that even in the yeast Saccharomyces cerevisiae, such cycles could take place upon continuous cleavage by the HO endonuclease (Lee, Paques et al. 1999). In mammalian cells, several experiment have shown that perfect re-ligation of compatible cohesive ends resulting from two independent but close I-SceI-induced DSBs is an efficient process (Guirouilh-Barbat, Huck et al. 2004; Guirouilh-Barbat, Rass et al. 2007; Bennardo, Cheng et al. 2008; Bennardo, Gunn et al. 2009). Absence of the Ku DNA repair protein does not significantly affect the overall frequency of NHEJ events rejoining the ends from the two DSBs; however it very strongly enhances the contribution of imprecise NHEJ to the repair process in CHO immortalized cells and mouse ES cells (Guirouilh-Barbat, Huck et al. 2004; Guirouilh-Barbat, Rass et al. 2007; Bennardo, Cheng et al. 2008). Furthermore, the absence of Ku stimulates I-SceI-induced events such as imprecise NHEJ (Bennardo, Cheng et al. 2008), single-strand annealing (Bennardo, Cheng et al. 2008) and gene conversion (Pierce, Hu et al. 2001; Bennardo, Cheng et al. 2008) in mouse ES cells. Similar observations shave been made with cells deficient for the XRCC4 repair protein (Pierce, Hu et al. 2001; Guirouilh-Barbat, Rass et al. 2007; Bennardo, Gunn et al. 2009) (although XRCC4 deficiency affects the overal level of NHEJ in CHO cells (Guirouilh-Barbat, Rass et al. 2007)) or for DNA-PK (Pierce, Hu et al. 2001). In contrast, knock-down of CtIP has been shown to suppresses “alt-NHEJ” (a Ku- and XRCC4-independent form of NHEJ more prone to result in imprecise NHEJ), single-strand annealing and gene conversion, while not affecting the overall level of rejoining of two compatible ends generated by I-SceI (Bennardo, Cheng et al. 2008). Thus, competition between different DSB repair pathways can affect the spectrum or repair events resulting from a nuclease-induced DSB.

[0105] In addition, DSB resection is important for certain DSB pathways. Extensive DSB resection, resulting in the generation of large single stranded regions (a few hundred nucleotides at least), has been shown in yeast to initiate single strand annealing (Sugawara and Haber 1992) and strand invasion, the ATP-dependant step that initiates many homologous recombination events of DNA duplex invasion by an homologous strand that (White and Haber 1990; Sun, Treco et al. 1991) (for a review of mechanisms, see (Paques and Haber 1999)). In eukaryotic cells DSB resection depends on several proteins including BLM/Sgs1 and DNA2, EXOI, and the MRN complex (Mre11, Rad50, Nbs1/Xrs2) and is thought to result from different pathways. MRN is involved in a small scale resection process, while two redundant pathways depending on BLM and DNA2 on one hand, and on EXOI on another hand, would be involved in extensive resection (Mimitou and Symington 2008; Nimonkar, Genschel et al. 2011). In addition, processing ends involving a damaged nucleotide (resulting from chemical cleavage or from a bulk adduct), requires the CtlP/Sae2 protein together with RMN (Sartori, Lukas et al. 2007; Buis, Wu et al. 2008; Hartsuiker, Mizuno et al. 2009). Over-expression of the Trex2 exonuclease was shown to strongly stimulate imperfect NHEJ associated with loss of only a few base pairs (Bennardo, Gunn et al. 2009), while it inhibited various kinds of DNA repair events between distant sequences (such as Single-strand annealing, NHEJ between ends from different breaks, or NHEJ repair of a single DSB involving remote micro-homologies). In the same study, it was suggested that Trex2 did resect the 3′ overhangs let by I-SceI in a non processive way. Thus, the type of stimulated pathway could in turn depend on the type of resection (length of resection, single strand vs. double strand, resection of 5′ strand vs. 3′ strand).

[0106] Thus, the efficiency of a compact TALEN, e.g. it ability to produce a desired event such as targeted mutagenesis or homologous gene targeting (see definition for full definition of “efficiency of compact TALEN”), can be enhanced by an enhancement or modification of its global DNA processing efficiency (see definition for full definition of “global DNA processing efficiency”), e.g. the global resultant or the overall result of different separate enzymatic activities that said compact TALEN.

[0107] In a preferred embodiment, enhancement of global DNA processing efficiency of a compact TALEN entity according to the present invention, compared to a starting compact TALEN entity, can be the hydrolysis of additional phosphodiester bonds at the cleavage site.

[0108] Said hydrolysis of additional phosphodiester bonds at the cleavage site by said at least one enhancer according to the invention can lead to different types of DSB resection affecting at said DSB cleavage site, one single DNA strand or both DNA strands, affecting either 5′ overhangs ends, either 3′ overhangs ends, or both ends and depending on the length of said resection. Thus, adding new nickase or cleavase activities to the existing cleavase activity of a compact TALEN entity can enhance the efficiency of the resulting enhanced compact TALEN according to the invention, at a genomic locus of interest (FIG. 8B-8E). As a non-limiting example, addition of two nickase activities on opposite strands (FIG. 8D) or of a new cleavase activity generating a second DSB (FIG. 8E) can result in a double-strand gap. As a consequence, perfect religation is no longer possible, and one or several alternative repair outcomes such as imprecise NHEJ, Homologous Recombination or SSA for instance, can be stimulated. As another non-limiting example, the addition of a single nickase activity can result in a single strand gap, and suppress the cohesiveness of the ends, which can also enhance the efficiency of the resulting enhanced compact TALEN at a genomic locus of interest, according to the invention, via stimulation of one or several alternative repair outcomes mentioned above.

[0109] In this aspect of the present invention, enhancement of DNA processing efficiency of a compact TALEN refers to the increase in the detected level of said DNA processing efficiency, against a target DNA sequence, of a enhanced compact TALEN in comparison to the activity of a first compact TALEN against the same target DNA sequence. Said first compact TALEN can be a starting compact TALEN, or a compact TALEN that has already been engineered or an enhanced compact TALEN according to the present invention. Several rounds of enhancement can be envisioned from a starting compact TALEN or from a starting enhanced compact TALEN.

[0110] In this aspect of the method of the present invention, enhancement of the DNA processing efficiency of the compact TALEN entity (or enhanced compact TALEN) refers to the increase in the detected level of said DNA processing efficiency against a target DNA sequence of interest or nearby said DNA sequence of interest in comparison to the efficiency of a first compact TALEN or starting compact TALEN against or nearby the same target DNA sequence. In this case, the starting compact TALEN is taken as the reference scaffold to measure the DNA processing efficiency. Said enhanced compact TALEN is an engineered compact TALEN comprising an enhancer domain according to this aspect of the invention. Said enhanced compact TALEN can also be taken as a reference scaffold for further enhancement of said DNA processing efficiency. As a non-limiting example, said DNA processing efficiency can result from a cleavage-induced recombination generated by said enhanced compact TALEN. In this case, said level of cleavage-induced recombination can be determined, for instance, by a cell-based recombination assay as described in the International PCT Application WO 2004/067736. Importantly, enhancement of efficacy in cells (enhanced generation of targeted mutagenesis or targeted recombination) can be, but is not necessarily associated with an enhancement of the cleavage activity that could be detected in certain in vitro assays. For example, additional phosphodiesterase activities as described in FIG. 8 could barely affect the cleavage profile, as detected by in vitro cleavage and separation of the cleavage products on an electrophoresis gel. However, as explained above, and in the legend of FIG. 8, the DSB ends generated in this way could be more prone to induce detectable genomic rearrangements such as targeted mutagenesis (by imprecise NHEJ) or homologous recombination. Said enhancement in cleavage-induced recombination of said enhanced compact TALEN is at least a 5% enhancement compared to the starting scaffold or starting compact TALEN, more preferably at least a 10% enhancement, again more preferably at least a 15% enhancement, again more preferably at least a 20% enhancement, again more preferably at least a 25% enhancement, again more preferably a 50% enhancement, again more preferably an enhancement greater than 50%, resulting in an enhancement of DNA processing efficiency of said enhanced compact TALEN of at least 5% compared to the starting scaffold or starting compact TALEN, more preferably at least a 10% enhancement, again more preferably at least a 15% enhancement, again more preferably at least a 20% enhancement, again more preferably at least a 25% enhancement, again more preferably a 50% enhancement, again more preferably a enhancement greater than 50%.

[0111] In another preferred embodiment according to the method of the present invention, the peptidic linker that can link said enhancer domain to one part of said compact TALEN entity according to the method of the present invention can be selected from the group consisting of NFS1, NFS2, CFS1, RM2, BQY, QGPSG, LGPDGRKA, 1a8h_{—}1, 1dnpA_{—}1, 1d8cA_{—}2, 1ckqA_{—}3, 1sbp_{—}1, 1ev7A_{—}1, 1alo_{—}3, 1amf_{—}1, 1adjA_{—}3, 1fcdC_{—}1, 1a13_{—}2, 1g3p_{—}1, 1acc_{—}3, 1ahjB_{—}1, 1acc_{—}1, 1af7_{—}1, 1heiA_{—}1, 1bia_{—}2, 1igtB_{—}1, 1nfkA_{—}1, 1au7A_{—}1, 1bpoB_{—}1, 1b0pA_{—}2, 1c05A_{—}2, 1gcb_{—}1, 1bt3A_{—}1, 1b3o13_{—}2, 16vpA_{—}6, 1dhx_{—}1, 1b8aA_{—}1 and 1qu6A_{—}1 as listed in Table 3 (SEQ ID NO: 67 to SEQ ID NO: 104 and SEQ ID NO: 372 to SEQ ID NO: 415). In a more preferred embodiment, the peptidic linker that can said enhancer domain to one part of said compact TALEN entity according to the method of the present invention can be selected from the group consisting of NFS1 (SEQ ID NO: 98), NFS2 (SEQ ID NO: 99) and CFS1 (SEQ ID NO: 100). In the scope of the present invention is also encompassed the case where a peptidic linker is not needed to fuse one enhancer domain to one part of said compact TALEN entity in order to obtain a enhanced compact TALEN according to the present invention.

[0112] Depending from its structural composition [type of core TALE scaffold, type of catalytic domain(s) with associated enzymatic activities, type of enhancers and eventually type of linker(s)], a compact TALEN or an enhanced compact TALEN according to the present invention can comprise different levels of separate enzymatic activities able to differently process DNA as mentioned above. By adding new enzymatic activities to said compact TALEN or said enhanced compact TALEN or enhancing the DNA processing efficiency of one or several of its constitutive enzymatic activities, one can enhance the global DNA processing efficiency of one compact TALEN or enhanced compact TALEN in comparison to a starting compact TALEN or enhanced compact TALEN.

[0113] According to the present invention, compact TALENs are designed to alleviate the need for multiple independent protein moieties when targeting a DNA processing event. Importantly, the requisite “spacer” region and dual target sites essential for the function of current TALENs are unnecessary. As each end of the core TALE scaffold is amenable to fusion, the order (N- v.s C-terminal) of addition of the catalytic and enhancement domains can vary with the application. In addition, since the catalytic domain does not require specific DNA contacts, there are no restrictions on regions surrounding the core TALE scaffold, as non-limiting examples depicted in FIG. 5: (A) N-terminal fusion construct to promote Homologous recombination induced by a cleavase domain or by a nickase domain. (B) C-terminal fusion construct with properties as in (A). (C) The attachment of two catalytic domains to both ends of the core TALE scaffold allows for dual cleavage with enhancement in NHEJ. Fusion junctions (N-vs. C-terminal) and linker designs can vary with the application.

[0114] According to the present invention, compact TALENs can be enhanced through the addition of a domain to promote existing or alternate activities as non-limiting examples depicted in FIG. 6: (A) A standard compact TALEN with an enhancer domain fused to the C-terminus of its core TALE scaffold part. (B) The enhancer domain is fused to the compact TALEN via the N-terminus of its catalytic domain part. Such a configuration can be used to assist and/or anchor the catalytic domain part near the DNA to increase DNA processing activity. (C) The enhancer domain is sandwiched between the catalytic domain part and the core TALE scaffold part. The enhancer domain can promote communication between the flanking domains (i.e. to assist in catalysis and/or DNA binding) or can be used to overcome the requisite T nucleotide at position −1 of all TALE-based targets. (D) The enhancer domain is used to functionally replace the engineered core TALE scaffold N-terminal region. (E) The enhancer domain is used to functionally replace the engineered core TALE scaffold C-terminal region. Fusion junctions (N-vs. C-terminal) and linker designs can vary with the application.

[0115] According to the present invention, the nature of the catalytic domain(s) comprised in the compact TALEN and the enhanced compact TALEN is application dependent. As a non-limiting example, a nickase domain should allow for a higher HR/NHEJ ratio than a cleavase domain, thereby being more agreeable for therapeutic applications (McConnell Smith, Takeuchi et al. 2009; Metzger, McConnell-Smith et al. 2011). For example, the coupling of a cleavase domain on one side with a nickase domain on the other could result in excision of a single-strand of DNA spanning the binding region of a compact TALEN. The targeted generation of extended single-strand overhangs could be applied in applications that target DNA repair mechanisms. For targeted gene inactivation, the use of two cleavase domains is then preferred. In another preferred embodiment, the use of two nickase domains can be favored. Furthermore, the invention relates to a method for generating several distinct types of compact TALENs that can be applied to applications ranging from targeted DNA cleavage to targeted gene regulation.

[0116] In another aspect, the present invention relates to a compact TALEN comprising:
[0117] (i) One core TALE scaffold comprising different sets of Repeat Variable Dipeptide regions (RVDs) to change DNA binding specificity and target a specific single double-stranded DNA target sequence of interest, onto which a selection of catalytic domains can be attached to effect DNA processing;
[0118] (ii) At least one catalytic domain wherein said catalytic domain is capable of processing DNA nearby said single double-stranded DNA target sequence of interest when fused to said engineered core TALE scaffold from (i);
[0119] (iii) Optionally one peptidic linker to fuse said catalytic domain from (ii) to said engineered core TALE scaffold from (i) when needed;
   such that said compact TALEN does not require dimerization to target a specific single double-stranded DNA target sequence of interest and process DNA nearby said single double-stranded DNA target sequence of interest. In other words, the compact TALEN according to the present invention is an active entity unit able, by itself, to target only one specific single double-stranded DNA target sequence of interest through one DNA binding domain and to process DNA nearby said single double-stranded DNA target sequence of interest.

[0120] The present invention relates to a compact TALEN monomer comprising:
[0121] (i) One core TALE scaffold comprising Repeat Variable Dipeptide regions (RVDs) having DNA binding specificity onto a specific double-stranded DNA target sequence of interest;
[0122] (ii) At least one catalytic domain wherein said catalytic domain is capable of processing DNA a few base pairs away from said double-stranded DNA target sequence of interest when fused to the C or N terminal of said core TALE scaffold from (i);
[0123] (iii) Optionally one peptidic linker to fuse said catalytic domain from (ii) to said engineered core TALE scaffold from (i) when needed;
   wherein said compact TALEN monomer is assembled to bind said target DNA sequence and process double-stranded DNA without requiring dimerization.

[0124] In another embodiment, said engineered core TALE scaffold of the compact TALEN according to the present invention comprises an additional N-terminal domain resulting in an engineered core TALE scaffold sequentially comprising a N-terminal domain and different sets of Repeat Variable Dipeptide regions (RVDs) to change DNA binding specificity and target a specific single double-stranded DNA target sequence of interest, onto which a selection of catalytic domains can be attached to effect DNA processing.

[0125] In another embodiment, said engineered core TALE scaffold of the compact TALEN according to the present invention comprises an additional C-terminal domain resulting in an engineered core TALE scaffold sequentially comprising different sets of Repeat Variable Dipeptide regions (RVDs) to change DNA binding specificity and target a specific single double-stranded DNA target sequence of interest and a C-terminal domain, onto which a selection of catalytic domains can be attached to effect DNA processing.

[0126] In another embodiment, said engineered core TALE-scaffold of the compact TALEN according to the present invention comprises additional N-terminus and a C-terminal domains resulting in an engineered core TALE scaffold sequentially comprising a N-terminal domain, different sets of Repeat Variable Dipeptide regions (RVDs) to change DNA binding specificity and target a specific single double-stranded DNA target sequence of interest and a C-terminal domain, onto which a selection of catalytic domains can be attached to effect DNA processing.

[0127] In another embodiment, said engineered core TALE-scaffold according to the present invention comprises the protein sequences selected from the group consisting of ST1 (SEQ ID NO: 134) and ST2 (SEQ ID NO: 135). In another embodiment, said engineered core TALE scaffold comprises a protein sequence having at least 80%, more preferably 90%, again more preferably 95% amino acid sequence identity with the protein sequences selected from the group consisting of SEQ ID NO: 134 and SEQ ID NO: 135. In another embodiment, said engineered core TALE-scaffold according to the present invention comprises the protein sequences selected from the group consisting of bT1-Avr (SEQ ID NO: 136), bT2-Avr (SEQ ID NO: 137), bT1-Pth (SEQ ID NO: 138) and bT2-Pth (SEQ ID NO: 139). In another embodiment, said engineered TALE-scaffold comprises a protein sequence having at least 80%, more preferably 90%, again more preferably 95% amino acid sequence identity with the protein sequences selected from the group consisting of SEQ ID NO: 136 to SEQ ID NO: 139.

[0128] In a preferred embodiment, said additional N-terminus and C-terminal domains of engineered core TALE scaffold are derived from natural TALE. In a more preferred embodiment said additional N-terminus and C-terminal domains of engineered core TALE scaffold are derived from natural TALE selected from the group consisting of AvrBs3, PthXo1, AvrHah1, PthA, Tal1c as non-limiting examples. In another more preferred embodiment, said additional N-terminus and/or said C-terminal domains are truncated forms of respective N-terminus and/or said C-terminal domains of natural TALE like AvrBs3, PthXo1, AvrHah1, PthA, Tal1c as non-limiting examples, from which they are derived. In a more preferred embodiment, said additional N-terminus and C-terminal domains sequences of engineered core TALE scaffold are selected from the group consisting of ST1 SEQ ID NO: 134 and ST2 SEQ ID NO: 135 as respectively exemplified in baseline protein scaffolds bT1-Avr (SEQ ID NO: 136) or bT1-Pth (SEQ ID NO: 138) and bT2-Avr (SEQ ID NO: 137) or bT2-Pth (SEQ ID NO: 139).

[0129] In another embodiment, each RVD of said core scaffold is made of 30 to 42 amino acids, more preferably 33 or 34 wherein two critical amino acids located at positions 12 and 13 mediates the recognition of one nucleotide of said nucleic acid target sequence; equivalent two critical amino acids can be located at positions other than 12 and 13 specialy in RVDs taller than 33 or 34 amino acids long. Preferably, RVDs associated with recognition of the different nucleotides are HD for recognizing C, NG for recognizing T, NI for recognizing A, NN for recognizing G or A, NS for recognizing A, C, G or T, HG for recognizing T, IG for recognizing T, NK for recognizing G, HA for recognizing C, ND for recognizing C, HI for recognizing C, HN for recognizing G, NA for recognizing G, SN for recognizing G or A and YG for recognizing T, TL for recognizing A, VT for recognizing A or G and SW for recognizing A. More preferably, RVDs associated with recognition of the nucleotides C, T, A, G/A and G respectively are selected from the group consisting of NN or NK for recognizing G, HD for recognizing C, NG for recognizing T and NI for recognizing A, TL for recognizing A, VT for recognizing A or G and SW for recognizing A. In another embodiment, RVDS associated with recognition of the nucleotide C are selected from the group consisting of N* and RVDS associated with recognition of the nucleotide T are selected from the group consisting of N* and H*, where * denotes a gap in the repeat sequence that corresponds to a lack of amino acid residue at the second position of the RVD. In another embodiment, critical amino acids 12 and 13 can be mutated towards other amino acid residues in order to modulate their specificity towards nucleotides A, T, C and G and in particular to enhance this specificity. By other amino acid residues is intended any of the twenty natural amino acid residues or unnatural amino acids derivatives.

[0130] In another embodiment, said core scaffold of the present invention comprises between 8 and 30 RVDs. More preferably, said core scaffold of the present invention comprises between 8 and 20 RVDs; again more preferably 15 RVDs.

[0131] In another embodiment, said core scaffold comprises an additional single truncated RVD made of 20 amino acids located at the C-terminus of said set of RVDs, i.e. an additional C-terminal half-RVD. In this case, said core scaffold of the present invention comprises between 8.5 and 30.5 RVDs, “0.5” referring to previously mentioned half-RVD (or terminal RVD, or half-repeat). More preferably, said core scaffold of the present invention comprises between 8.5 and 20.5 RVDs, again more preferably, 15.5 RVDs. In a preferred embodiment, said half-RVD is in a core scaffold context which allows a lack of specificity of said half-RVD toward nucleotides A, C, G, T. In a more preferred embodiment, said half-RVD is absent.

[0132] In another embodiment, said core scaffold of the present invention comprises RVDs of different origins. In a preferred embodiment, said core scaffold comprises RVDs originating from different naturally occurring TAL effectors. In another preferred embodiment, internal structure of some RVDs of the core scaffold of the present invention are constituted by structures or sequences originated from different naturally occurring TAL effectors. In another embodiment, said core scaffold of the present invention comprises RVDs-like domains. RVDs-like domains have a sequence different from naturally occurring RVDs but have the same function and/or global structure within said core scaffold of the present invention.

[0133] In another embodiment, said additional N-terminal domain of said engineered core TALE scaffold of said compact TALEN according to the present invention is an enhancer domain. In another embodiment, said enhancer domain is selected from the group consisting of Puf RNA binding protein or Ankyrin super-family, as non-limiting examples. In another embodiment, said enhancer domain sequence is selected from the group consisting of protein domains of SEQ ID NO: 4 and SEQ ID NO: 5 as non-limiting examples listed in Table 1, a functional mutant, a variant or a derivative thereof. In another embodiment, said additional C-terminal domain of said engineered core TALE scaffold is an enhancer domain. In another embodiment, said enhancer domain is selected from the group consisting of hydrolase/transferase of Pseudomonas Aeuriginosa family, the polymerase domain from the Mycobacterium tuberculosis Ligase D family, the initiation factor elF2 from Pyrococcus family, the translation initiation factor Aif2 family as non-limiting examples. In another embodiment, said enhancer domain sequence is selected from the group consisting of protein domains of SEQ ID NO: 6 to SEQ ID NO: 9 as non-limiting examples listed in Table 1.

[0134] In another preferred embodiment, the catalytic domain that is capable of processing DNA nearby the single double-stranded DNA target sequence of interest, when fused to said engineered core TALE scaffold according to the present invention, is fused to the N-terminus part of said core TALE scaffold. In another preferred embodiment, said catalytic domain is fused to the C-terminus part of said core TALE scaffold. In another preferred embodiment two catalytic domains are fused to both N-terminus part of said core TALE scaffold and C-terminus part of said core TALE scaffold. In a more preferred embodiment, said catalytic domain has an enzymatic activity selected from the group consisting of nuclease activity, polymerase activity, kinase activity, phosphatase activity, methylase activity, topoisomerase activity, integrase activity, transposase activity or ligase activity. In another preferred embodiment, the catalytic domain fused to the core TALE scaffold of the present invention can be a transcription activator or repressor (i.e. a transcription regulator), or a protein that interacts with or modifies other proteins such as histones. Non-limiting examples of DNA processing activities of said compact TALEN of the present invention include, for example, creating or modifying epigenetic regulatory elements, making site-specific insertions, deletions, or repairs in DNA, controlling gene expression, and modifying chromatin structure.

[0135] In another more preferred embodiment, said catalytic domain has an endonuclease activity. In another more preferred embodiment, said catalytic domain of the compact TALEN according to the present invention has cleavage activity on said double-stranded DNA according to the method of the present invention. In another more preferred embodiment, said catalytic domain has a nickase activity on said double-stranded DNA according to the method of the present invention. In another more preferred embodiment, said catalytic domain is selected from the group consisting of proteins MmeI, Colicin-E7 (CEA7_ECOLX), Colicin-E9, APFL, EndA, Endo I (END1_ECOLI), Human Endo G (NUCG_HUMAN), Bovine Endo G (NUCG_BOVIN), R.HinP1I, I-BasI, I-BmoI, I-HmuI, I-TevI, I-TevII, I-TevIII, I-TwoI, R.MspI, R.MvaI, NucA, NucM, Vvn, Vvn_CLS, Staphylococcal nuclease (NUC_STAAU), Staphylococcal nuclease (NUC_STAHY), Micrococcal nuclease (NUC_SHIFL), Endonuclease yncB, Endodeoxyribonuclease I (ENRN_BPT7), Metnase, Nb.BsrDI, BsrDI A, Nt.BspD6I (R.BspD6I large subunit), ss.BspD6I (R.BspD6I small subunit), R.PleI, MlyI, AlwI, Mva1269I, BsrI, BsmI, Nb.BtsCI, Nt.BtsCI, R1.BtsI, R2.BtsI, BbvCI subunit 1, BbvCI subunit 2, Bpu10I alpha subunit, Bpu10I beta subunit, BmrI, BfiI, I-CreI, hExol (EXO1_HUMAN), Yeast Exol (EXO1_YEAST), E. coli Exol, Human TREX2, Mouse TREX1, Human TREX1, Bovine TREX1, Rat TREX1, Human DNA2, Yeast DNA2 (DNA2_YEAST) and VP16, as listed in Table 2 (SEQ ID NO: 10 to SEQ ID NO: 66 and SEQ ID NO: 1, 366 & 367), a functional mutant, a variant or a derivative thereof. In another preferred embodiment said catalytic domain of the compact TALEN according to the present invention is I-TevI (SEQ ID NO: 20), a functional mutant, a variant or a derivative thereof. In another preferred embodiment, catalytic domain I-TevI (SEQ ID NO: 20), a functional mutant, a variant or a derivative thereof is fused to the N-terminal domain of said core TALE scaffold according to the compact TALEN of the present invention. In another preferred embodiment, said compact TALEN according to the present invention comprises a protein sequence having at least 80%, more preferably 90%, again more preferably 95% amino acid sequence identity with the protein sequences selected from the group of SEQ ID NO: 426-432.

[0136] In another preferred embodiment, said catalytic domain of the compact TALEN according to the present invention is ColE7 (SEQ ID NO: 11), a functional mutant, a variant or a derivative thereof. In another preferred embodiment, catalytic domain ColE7 (SEQ ID NO: 11), a functional mutant, a variant or a derivative thereof is fused to the N-terminal domain of said core TALE scaffold according to the method of the present invention. In another preferred embodiment, catalytic domain ColE7 (SEQ ID NO: 11), a functional mutant, a variant or a derivative thereof is fused to the C-terminal domain of said core TALE scaffold according to the method of the present invention. In another preferred embodiment, said compact TALEN according to the method of the present invention comprises a protein sequence having at least 80%, more preferably 90%, again more preferably 95% amino acid sequence identity with the protein sequences selected from the group of SEQ ID NO: 435-438.

[0137] In another preferred embodiment, said catalytic domain of the compact TALEN according to the present invention is NucA (SEQ ID NO: 26), a functional mutant, a variant or a derivative thereof. In another preferred embodiment, catalytic domain NucA (SEQ ID NO: 26), a functional mutant, a variant or a derivative thereof is fused to the N-terminal domain of said core TALE scaffold according to the method of the present invention. In another preferred embodiment, catalytic domain NucA (SEQ ID NO: 26), a functional mutant, a variant or a derivative thereof is fused to the C-terminal domain of said core TALE scaffold according to the method of the present invention. In another preferred embodiment, said compact TALEN according to the method of the present invention comprises a protein sequence having at least 80%, more preferably 90%, again more preferably 95% amino acid sequence identity with the protein sequences selected from the group of SEQ ID NO: 433-434.

[0138] In another preferred embodiment, said catalytic domain is I-CreI (SEQ ID NO: 1), a functional mutant, a variant or a derivative thereof. In another preferred embodiment, catalytic domain I-CreI (SEQ ID NO: 1), a functional mutant, a variant or a derivative thereof is fused to the N-terminal domain of said core TALE scaffold according to the method of the present invention. In another preferred embodiment, catalytic domain I-CreI (SEQ ID NO: 1), a functional mutant, a variant or a derivative thereof is fused to the C-terminal domain of said core TALE scaffold according to the present invention. In another preferred embodiment, said compact TALEN according to the present invention comprises a protein sequence having at least 80%, more preferably 90%, again more preferably 95% amino acid sequence identity with the protein sequences selected from the group of SEQ ID NO: 439-441 and SEQ ID NO: 444-446.

[0139] In another embodiment, said catalytic domain is a restriction enzyme such as MmeI, R-HinPll, R.MspI, R.MvaI, Nb.BsrDI, BsrDI A, Nt.BspD6I, ss.BspD6I, R.PleI, MlyI and AlwI as non-limiting examples listed in table 2. In another more preferred embodiment, said catalytic domain has an exonuclease activity. In another more preferred embodiment, any combinations of two catalytic domains selected from the group consisting of proteins MmeI, Colicin-E7 (CEA7_ECOLX), Colicin-E9, APFL, EndA, Endo I (END1_ECOLI), Human Endo G (NUCG_HUMAN), Bovine Endo G (NUCG_BOVIN), R.HinP1I, I-BasI, I-BmoI, I-HmuI, I-TevI, I-TevII, I-TevIII, I-TwoI, R.MspI, R.MvaI, NucA, NucM, Vvn, Vvn_CLS, Staphylococcal nuclease (NUC_STAAU), Staphylococcal nuclease (NUC_STAHY), Micrococcal nuclease (NUC_SHIFL), Endonuclease yncB, Endodeoxyribonuclease I (ENRN_BPT7), Metnase, Nb.BsrDI, BsrDI A, Nt.BspD6I (R.BspD6I large subunit), ss.BspD6I (R.BspD6I small subunit), R.PleI, MlyI, AlwI, Mva1269I, BsrI, BsmI, Nb.BtsCI, Nt.BtsCI, R1.BtsI, R2.BtsI, BbvCI subunit 1, BbvCI subunit 2, Bpu10I alpha subunit, Bpu10I beta subunit, BmrI, BfiI, I-CreI, hExol (EXO1_HUMAN), Yeast Exol (EXO1_YEAST), E. coli Exol, Human TREX2, Mouse TREX1, Human TREX1, Bovine TREX1, Rat TREX1, Human DNA2, Yeast DNA2 (DNA2_YEAST) and VP16, as listed in Table 2 (SEQ ID NO: 10 to SEQ ID NO: 66 and SEQ ID NO: 1, 366 & 367), a functional mutant, a variant or a derivative of these protein domains thereof, can be fused to both N-terminus part and C-terminus part of said core TALE scaffold, respectively. For example, I-HmuI catalytic domain can be fused to the N-terminus part of said core TALE scaffold and ColE7 catalytic domain can be fused to the C-terminus part of said core TALE scaffold. In another example, I-TevI catalytic domain can be fused to the N-terminus part of said core TALE scaffold and ColE7 catalytic domain can be fused to the C-terminus part of said core TALE scaffold.

[0140] Table 14 below gives non-limiting examples of combinations of catalytic domains that can be comprised in the compact TALEN monomer according to the present invention. Optionally, FokI (SEQ ID NO:368) can be used in combination with another catalytic domain according to the list of Table2.

TABLE 14
Examples of combinations of catalytic domains respectively fused
to N and C-terminus part of compact TALEN core scaffolds according
to the present invention leading to dual-cleavage TALENs.

| Catalytic domain | Catalytic domain | |
|---|---|---|
| fused to N-terminus | fused to C-terminus | |
| part of core TALE | part of core TALE | Dual-cleavage |
| scaffold | scaffold | TALENS |
| I-TevI | I-TevI | TevI-TevI |
| ColE7 | ColE7 | ColE7-ColE7 |
| NucA | NucA | NucA-NucA |
| I-TevI | ColE7 | TevI-ColE7 |
| I-TevI | NucA | TevI-NucA |
| ColE7 | I-TevI | ColE7-TevI |
| ColE7 | NucA | ColE7-NucA |
| NucA | I-TevI | NucA-TevI |
| NucA | ColE7 | NucA-ColE7 |

[0141] In a preferred embodiment according to the present invention, said unique compact TALEN monomer comprises a combination of two catalytic domains respectively fused to the N-terminus part and to the C-terminus part of said core TALE scaffold selected from the group consisting of:
[0142] (i) A Nuc A domain (SEQ ID NO: 26) in N-terminus and a Nuc A domain (SEQ ID NO: 26) in C-terminus;
[0143] (ii) A ColE7 domain (SEQ ID NO: 11) in N-terminus and a ColE7 domain (SEQ ID NO: 11) in C-terminus;
[0144] (iii) A TevI domain (SEQ ID NO: 20) in N-terminus and a ColE7 domain (SEQ ID NO: 11) in C-terminus;
[0145] (iv) A TevI domain (SEQ ID NO: 20) in N-terminus and a NucA domain (SEQ ID NO: 26) in C-terminus;
[0146] (v) A ColE7 domain (SEQ ID NO: 11) in N-terminus and a NucA domain (SEQ ID NO: 26) in C-terminus;
[0147] (vi) A NucA domain (SEQ ID NO: 26) in N-terminus and a ColE7 domain (SEQ ID NO: 11) in C-terminus.

[0148] In another preferred embodiment, said compact TALEN according to the present invention comprises a protein sequence having at least 80%, more preferably 90%, again more preferably 95% amino acid sequence identity with the protein sequences selected from the group consisting of SEQ ID NO: 448 and 450.

[0149] In another preferred embodiment, said compact TALEN according to the present invention comprises a combination of two catalytic domains respectively fused to the C-terminus part and to the N-terminus part of said core TALE scaffold selected from the group consisting of:
[0150] (i) A TevI domain (SEQ ID NO: 20) in N-terminus and a FokI domain (SEQ ID NO: 368) in C-terminus;
[0151] (ii) A TevI domain (SEQ ID NO: 20) in N-terminus and a TevI domain (SEQ ID NO: 20) in C-terminus;
[0152] (iii) A scTrex2 domain (SEQ ID NO: 451) in N-terminus and a FokI domain (SEQ ID NO: 368) in C-terminus.

[0153] In another preferred embodiment, said compact TALEN according to the present invention comprises a protein sequence having at least 80%, more preferably 90%, again more preferably 95% amino acid sequence identity with the protein sequences selected from the group consisting of SEQ ID NO: 447-450 and SEQ ID NO: 452.

[0154] In the scope of the present invention, it can be envisioned to insert said catalytic domain and/or said enhancer domain between two parts of the engineered core TALE scaffold according to the invention, each part comprising one set of RVDs. In this last case, the number of RVDs for each part of the engineered core TALE scaffold can be the same or not. In other words, it can be envisioned to split said core TALE scaffold of the present invention to insert one catalytic domain and/or one enhancer domain between the resulting two parts of said engineered core TALE scaffold. In another preferred embodiment, said compact TALEN according to the present invention comprises a protein sequence having at least 80%, more preferably 90%, again more preferably 95% amino acid sequence identity with the protein sequences selected from the group consisting of SEQ ID NO: 453-455.

[0155] In other words, the compact TALEN monomer of the present invention comprises a protein sequence having at least 80%, more preferably 90%, again more preferably 95% amino acid sequence identity with the protein sequences selected from the group consisting of SEQ ID NO: 420-450 and 452-455.

[0156] In another preferred embodiment according to the method of the present invention, the peptidic linker that can link said catalytic domain to the core TALE scaffold according to the method of the present invention can be selected from the group consisting of NFS1, NFS2, CFS1, RM2, BOY, QGPSG, LGPDGRKA, 1a8h_{—}1, 1dnpA_{—}1, 1d8cA_{—}2, 1ckqA_{—}3, 1sbp_{—}1, 1ev7A_{—}1, 1alo_{—}3, 1amf 1, 1adjA_{—}3, 1fcdC_{—}1, 1a13_{—}2, 1g3p_{—}1, 1acc_{—}3, 1ahjB_{—}1, 1acc_{—}1, 1af7_{—}1, 1heiA_{—}1, 1bia_{—}2, 1igtB_{—}1, 1nfkA_{—}1, 1au7A_{—}1, 1 bpoB_{—}1, 1b0pA_{—}2, 1c05A_{—}2, 1gcb_{—}1, 1bt3A_{—}1, 1b3o13_{—}2, 16vpA_{—}6, 1dhx_{—}1, 1b8aA_{—}1 and 1qu6A_{—}1, as listed in Table 3 (SEQ ID NO: 67 to SEQ ID NO: 104 and SEQ ID NO: 372 to SEQ ID NO: 415). In a more preferred embodiment, the peptidic linker that can link said catalytic domain to the core TALE scaffold according to the method of the present invention can be selected from the group consisting of NFS1 (SEQ ID NO: 98), NFS2 (SEQ ID NO: 99) and CFS1 (SEQ ID NO: 100). In the scope of the present invention is also encompassed the case where a peptidic linker is not needed to fuse a catalytical domain to the TALE scaffold in order to obtain a cTALEN according to the present invention.

[0157] Depending from its structural composition [type of core TALE scaffold, type of catalytic domain(s) with associated enzymatic activities and eventually type of linker(s)], a compact TALEN according to the present invention can comprise different levels of separate enzymatic activities able to differently process DNA, resulting in a global DNA processing efficiency for said compact TALEN, each one of said different enzymatic activities having their own DNA processing efficiency.

[0158] In another preferred embodiment, the compact TALEN according to the present invention further comprises:
[0159] (i) at least one enhancer domain;
[0160] (ii) Optionally one peptide linker to fuse said enhancer domain to one part of said compact TALEN active entity;
   thereby obtaining a compact TALEN entity with enhanced DNA processing efficiency nearby a single double-stranded DNA target sequence of interest, i.e. an enhanced compact TALEN.

[0161] In other words, said unique compact TALEN monomer further comprises:
[0162] (i) At least one enhancer domain;
[0163] (ii) Optionally one peptide linker to fuse said enhancer domain to one part of said unique compact TALEN monomer active entity.

[0164] In another more preferred embodiment, said enhancer domain is fused to N-terminus of the core TALE scaffold part of said compact TALEN entity. In another more preferred embodiment, said enhancer domain is fused to C-terminus of the core TALE scaffold part of said compact TALEN entity. In another more preferred embodiment, said enhancer domain is fused to the catalytic domain part of said compact TALEN entity. In another more preferred embodiment, said enhancer domain is fused between the N-terminus part of the core TALE scaffold and the catalytic part of said compact TALEN entity. In another more preferred embodiment, said enhancer domain is fused between the C-terminus part of the core TALE scaffold and the catalytic part of said compact TALEN entity. In the scope of the present invention, it can be envisioned to insert said catalytic domain and/or enhancer domain between two parts of the engineered core TALE scaffold according to the invention, each part comprising one set of RVDs. In this last case, the number of RVDs for each engineered core TALE scaffold can be the same or not. In other words, it can be envisioned to split said core TALE scaffold of the present invention to insert one catalytic domain and/or one enhancer domain between the resulting two parts of said engineered core TALE scaffold.

[0165] In another preferred embodiment, said enhancer domain is catalytically active or not, providing functional and/or structural support to said compact TALEN entity. In a more preferred embodiment, said enhancer domain consists of a protein domain selected from the group consisting of MmeI, Colicin-E7 (CEA7_ECOLX), Colicin-E9, APFL, EndA, Endo I (END1_ECOLI), Human Endo G (NUCG_HUMAN), Bovine Endo G (NUCG_BOVIN), R.HinP1I, I-BasI, I-BmoI, I-HmuI, I-TevI, I-TevII, I-TevIII, I-TwoI, R.MspI, R.MvaI, NucA, NucM, Vvn, Vvn_CLS, Staphylococcal nuclease (NUC_STAAU), Staphylococcal nuclease (NUC_STAHY), Micrococcal nuclease (NUC_SHIFL), Endonuclease yncB, Endodeoxyribonuclease I (ENRN_BPT7), Metnase, Nb.BsrDI, BsrDI A, Nt.BspD6I (R.BspD6I large subunit), ss.BspD6I (R.BspD6I small subunit), R.PleI, MIyI, AlwI, Mva1269I, BsrI, BsmI, Nb.BtsCI, Nt.BtsCI, R1.BtsI, R2.BtsI, BbvCI subunit 1, BbvCI subunit 2, Bpu10I alpha subunit, Bpu10I beta subunit, BmrI, BfiI, I-CreI, hExol (EXO1_HUMAN), Yeast Exol (EXO1_YEAST), E. coli Exol, Human TREX2, Mouse TREX1, Human TREX1, Bovine TREX1, Rat TREX1, Human DNA2, Yeast DNA2 (DNA2_YEAST) and VP16, as listed in Table 2 (SEQ ID NO: 10 to SEQ ID NO: 66 and SEQ ID NO: 1, 366 & 367), a functional mutant, a variant or a derivative of these protein domains thereof. In another more preferred embodiment, said enhancer domain consists of a catalytically active derivative of the protein domains listed above and in Table 2, providing functional and/or structural support to said compact TALEN entity. In another preferred embodiment, said enhancer domain consists of a catalytically inactive derivative of the protein domains listed above and in Table 2, providing structural support to said compact TALEN entity. In another preferred embodiment, said enhancer domain is selected from the group consisting of I-TevI (SEQ ID NO: 20), ColE7 (SEQ ID NO: 11) and NucA (SEQ ID NO: 26).

[0166] In a more preferred embodiment, said enhanced compact TALEN according to the present invention can comprise a second enhancer domain. In this embodiment, said second enhancer domain can have the same characteristics than the first enhancer domain. In a more preferred embodiment, said second enhancer domain provides structural support to enhanced compact TALEN entity. In another more preferred embodiment, said second enhancer domain provides functional support to enhanced compact TALEN entity. In a more preferred embodiment, said second enhancer domain provides structural and functional supports to enhanced compact TALEN entity. In a more preferred embodiment, said enhanced compact TALEN entity comprises one catalytic domain and one enhancer domain. In another more preferred embodiment said enhanced compact TALEN entity comprises one catalytic domain and two enhancer domains. In another more preferred embodiment said enhanced compact TALEN entity comprises two catalytic domains and one enhancer domains. In another more preferred embodiment said enhanced compact TALEN entity comprises two catalytic domains and two enhancer domains.

[0167] In a more preferred embodiment, said second enhancer domain consists of a protein domain derived from a protein selected from the group consisting of MmeI, Colicin-E7 (CEA7_ECOLX), Colicin-E9, APFL, EndA, Endo I (END1_ECOLI), Human Endo G (NUCG_HUMAN), Bovine Endo G (NUCG_BOVIN), R.HinP1I, I-BasI, I-BmoI, I-HmuI, I-TevI, I-TevII, I-TevIII, I-TwoI, R.MspI, R.MvaI, NucA, NucM, Vvn, Vvn_CLS, Staphylococcal nuclease (NUC_STAAU), Staphylococcal nuclease (NUC_STAHY), Micrococcal nuclease (NUC_SHIFL), Endonuclease yncB, Endodeoxyribonuclease I (ENRN_BPT7), Metnase, Nb.BsrDI, BsrDI A, Nt.BspD6I (R.BspD6I large subunit), ss.BspD6I (R.BspD6I small subunit), R.PleI, MlyI, AlwI, Mva1269I, BsrI, BsmI, Nb.BtsCI, Nt.BtsCI, R1.BtsI, R2.BtsI, BbvCI subunit 1, BbvCI subunit 2, Bpu10I alpha subunit, Bpu10I beta subunit, BmrI, BfiI, I-CreI, hExol (EXO1_HUMAN), Yeast Exol (EXO1_YEAST), E. coli Exol, Human TREX2, Mouse TREX1, Human TREX1, Bovine TREX1, Rat TREX1, Human DNA2, Yeast DNA2 (DNA2_YEAST) and VP16, as listed in Table 2 (SEQ ID NO: 10 to SEQ ID NO: 66 and SEQ ID NO: 1, 366 & 367), a functional mutant, a variant or a derivative of these protein domains thereof. In another more preferred embodiment, said second enhancer domain consists of a catalytically active derivative of the protein domains listed above and in Table 2, providing functional and/or structural support to said enhanced compact TALEN entity. In another preferred embodiment, said second enhancer domain consists of a catalytically inactive derivative of the protein domains listed above and in Table 2, providing structural support to said enhanced compact TALEN entity.

[0168] In another more preferred embodiment, any combinations of catalytic and/or enhancer domains listed above, as non-limiting examples, can be envisioned to be fused to said core TALE scaffold providing structural and/or functional support to said compact TALEN entity. More preferably, combinations of catalytic domains listed in Table 14. Again more preferably, combinations of catalytic domains selected from the group of TevI (SEQ ID NO: 20), ColE7 (SEQ ID NO: 11) and NucA (SEQ ID NO: 26) can be envisioned. Optionally, FokI (SEQ ID NO: 368) can be used in combination with another catalytic domain according to the list of Tablet. Such combinations of catalytic and/or enhancer domains can be envisioned regarding the envisioned applications for using the method of the present invention. Depending from its structural composition [type of core TALE scaffold, type of catalytic domain(s) with associated enzymatic activities, type of linker(s) and type of enhancer(s) domains], an enhanced compact TALEN according to the present invention can present different levels of separate enzymatic activities able to differently process DNA, resulting in a global DNA processing efficiency for said enhanced compact TALEN, each one of said different enzymatic activities having their own DNA processing efficiency.

[0169] In this preferred embodiment, the DNA processing efficiency of the compact TALEN entity according to the present invention can be enhanced by the engineering of at least one enhancer domain and one peptidic linker thereby obtaining a compact TALEN entity with enhanced DNA processing activity nearby a single double-stranded DNA target sequence of interest, i.e. a enhanced compact TALEN according to the present invention.

[0170] Depending from its structural composition, the global DNA processing efficiency that is enhanced in said enhanced compact TALEN according to the present invention, can have a dominant enzymatic activity selected from the group consisting of a nuclease activity, a polymerase activity, a kinase activity, a phosphatase activity, a methylase activity, a topoisomerase activity, an integrase activity, a transposase activity or a ligase activity as non-limiting examples. In a more preferred embodiment, the global DNA processing efficiency that is enhanced in said enhanced compact TALEN according to the present invention is a combination of different enzymatic activities selected from the group consisting of a nuclease activity, a polymerase activity, a kinase activity, a phosphatase activity, a methylase activity, a topoisomerase activity, an integrase activity, a transposase activity or a ligase activity as non-limiting examples. In a more preferred embodiment, the global DNA processing efficiency that is enhanced in said enhanced compact TALEN according to the present invention is one of its different enzymatic activities selected from the group consisting of a nuclease activity, a polymerase activity, a kinase activity, a phosphatase activity, a methylase activity, a topoisomerase activity, an integrase activity, a transposase activity or a ligase activity as non-limiting examples. In this case, the global DNA processing efficiency is equivalent to one DNA processing activity amongst the enzymatic activities mentioned above. In another more preferred embodiment, said DNA processing activity of the compact TALEN entity which is enhanced by the enhancer is a cleavase activity or a nickase activity or a combination of both a cleavase activity and a nickase activity.

[0171] Enhancement of DNA processing efficiency of a compact TALEN entity according to the present invention can be a consequence of a structural support by said at least one enhancer domain. In a preferred embodiment, said structural support enhances the binding of a compact TALEN entity according to the invention for said DNA target sequence compared to the binding of a starting compact TALEN entity for the same DNA target sequence, thereby indirectly assisting the catalytic domain(s) to obtain a compact TALEN entity with enhanced DNA processing activity. In another preferred embodiment, said structural support enhances the existing catalytical activity of a compact TALEN entity for a DNA target sequence compared to the binding of a starting compact TALEN entity for the same DNA target sequence to obtain a compact TALEN entity with enhanced DNA processing activity.

[0172] In another preferred embodiment, said enhancer according to the present invention both enhances the binding of the compact TALEN entity for said DNA target sequence and the catalytic activity of the catalytic domain(s) to obtain a compact TALEN entity with enhanced DNA processing activity. All these non-limiting examples lead to a compact TALEN entity with enhanced DNA processing efficiency for a DNA target sequence at a genomic locus of interest, i.e. an enhanced compact TALEN according to the present invention.

[0173] Enhancement of DNA processing efficiency of a compact TALEN entity according to the present invention, compared to a starting compact TALEN entity, can also be a consequence of a fuctional support by said at least one enhancer domain. In a preferred embodiment, said functional support can be the consequence of the hydrolysis of additional phosphodiester bonds. In a more preferred embodiment, said functional support can be the hydrolysis of additional phosphodiester bonds by a protein domain derived from a nuclease. In a more preferred embodiment, said functional support can be the hydrolysis of additional phosphodiester bonds by a protein domain derived from an endonuclease. In a more preferred embodiment, said functional support can be the hydrolysis of additional phosphodiester bonds by a protein domain derived from a cleavase. In another more preferred embodiment, said functional support can be the hydrolysis of additional phosphodiester bonds by a protein domain derived from a nickase. In a more preferred embodiment, said functional support can be the hydrolysis of additional phosphodiester bonds by a protein domain derived from an exonuclease.

[0174] In genome engineering experiments, the efficiency of rare-cutting endonuclease, e.g. their ability to induce a desired event (Homologous gene targeting, targeted mutagenesis, sequence removal or excision) at a locus, depends on several parameters, including the specific activity of the nuclease, probably the accessibility of the target, and the efficacy and outcome of the repair pathway(s) resulting in the desired event (homologous repair for gene targeting, NHEJ pathways for targeted mutagenesis).

[0175] Cleavage by peptidic rare cutting endonucleases usually generates cohesive ends, with 3′ overhangs for LAGLIDADG meganucleases (Chevalier and Stoddard 2001) and 5′ overhangs for Zinc Finger Nucleases (Smith, Bibikova et al. 2000). These ends, which result from hydrolysis of phosphodiester bonds, can be re-ligated in vivo by NHEJ in a seamless way (i.e. a scarless re-ligation). The restoration of a cleavable target sequence allows for a new cleavage event by the same endonuclease, and thus, a series of futile cycles of cleavage and re-ligation events can take place. Indirect evidences have shown that even in the yeast Saccharomyces cerevisiae, such cycles could take place upon continuous cleavage by the HO endonuclease (Lee, Paques et al. 1999). In mammalian cells, several experiment have shown that perfect re-ligation of compatible cohesive ends resulting from two independent but close I-SceI-induced DSBs is an efficient process (Guirouilh-Barbat, Huck et al. 2004; Guirouilh-Barbat, Rass et al. 2007; Bennardo, Cheng et al. 2008; Bennardo, Gunn et al. 2009). Absence of the Ku DNA repair protein does not significantly affect the overall frequency of NHEJ events rejoining the ends from the two DSBs; however it very strongly enhances the contribution of imprecise NHEJ to the repair process in CHO immortalized cells and mouse ES cells (Guirouilh-Barbat, Huck et al. 2004; Guirouilh-Barbat, Rass et al. 2007; Bennardo, Cheng et al. 2008). Furthermore, the absence of Ku stimulates I-SceI-induced events such as imprecise NHEJ (Bennardo, Cheng et al. 2008), single-strand annealing (Bennardo, Cheng et al. 2008) and gene conversion (Pierce, Hu et al. 2001; Bennardo, Cheng et al. 2008) in mouse ES cells. Similar observations shave been made with cells deficient for the XRCC4 repair protein (Pierce, Hu et al. 2001; Guirouilh-Barbat, Rass et al. 2007; Bennardo, Gunn et al. 2009) (although XRCC4 deficiency affects the overal level of NHEJ in CHO cells (Guirouilh-Barbat, Rass et al. 2007)) or for DNA-PK (Pierce, Hu et al. 2001). In contrast, knock-down of CtIP has been shown to suppresses “alt-NHEJ” (a Ku- and XRCC4-independent form of NHEJ more prone to result in imprecise NHEJ), single-strand annealing and gene conversion, while not affecting the overall level of rejoining of two compatible ends generated by I-SceI (Bennardo, Cheng et al. 2008). Thus, competition between different DSB repair pathways can affect the spectrum or repair events resulting from a nuclease-induced DSB.

[0176] In addition, DSB resection is important for certain DSB pathways. Extensive DSB resection, resulting in the generation of large single stranded regions (a few hundred nucleotides at least), has been shown in yeast to initiate single strand annealing (Sugawara and Haber 1992) and strand invasion, the ATP-dependant step that initiates many homologous recombination events of DNA duplex invasion by an homologous strand that (White and Haber 1990; Sun, Treco et al. 1991) (for a review of mechanisms, see (Paques and Haber 1999)). In eukaryotic cells DSB resection depends on several proteins including BLM/Sgs1 and DNA2, EXOI, and the MRN complex (Mre11, Rad50, Nbs1/Xrs2) and is thought to result from different pathways. MRN is involved in a small scale resection process, while two redundant pathways depending on BLM and DNA2 on one hand, and on EXOI on another hand, would be involved in extensive resection (Mimitou and Symington 2008; Nimonkar, Genschel et al. 2011). In addition, processing ends involving a damaged nucleotide (resulting from chemical cleavage or from a bulk adduct), requires the CtIP/Sae2 protein together with RMN (Sartori, Lukas et al. 2007; Buis, Wu et al. 2008; Hartsuiker, Mizuno et al. 2009). Over-expression of the Trex2 exonuclease was shown to strongly stimulate imperfect NHEJ associated with loss of only a few base pairs (Bennardo, Gunn et al. 2009), while it inhibited various kinds of DNA repair events between distant sequences (such as Single-strand annealing, NHEJ between ends from different breaks, or NHEJ repair of a single DSB involving remote micro-homologies). In the same study, it was suggested that Trex2 did resect the 3′ overhangs let by I-SceI in a non processive way. Thus, the type of stimulated pathway could in turn depend on the type of resection (length of resection, single strand vs. double strand, resection of 5′ strand vs. 3′ strand).

[0177] Thus, the efficiency of a compact TALEN, e.g. it ability to produce a desired event such as targeted mutagenesis or homologous gene targeting (see definition for full definition of “efficiency of compact TALEN”), can be enhanced by an enhancement or modification of its global DNA processing efficiency (see definition for full definition of “global DNA processing efficiency”), e.g. the global resultant or the overall result of different separate enzymatic activities that said compact TALEN.

[0178] In a preferred embodiment, enhancement of global DNA processing efficiency of a compact TALEN entity according to the present invention, compared to a starting compact TALEN entity, can be the hydrolysis of additional phosphodiester bonds at the cleavage site.

[0179] Said hydrolysis of additional phosphodiester bonds at the cleavage site by said at least one enhancer according to the invention can lead to different types of DSB resection affecting at said DSB cleavage site, one single DNA strand or both DNA strands, affecting either 5′ overhangs ends, either 3′ overhangs ends, or both ends and depending on the length of said resection. Thus, adding new nickase or cleavase activities to the existing cleavase activity of a compact TALEN entity can enhance the efficiency of the resulting enhanced compact TALEN according to the invention, at a genomic locus of interest (FIG. 8B-8E). As a non-limiting example, addition of two nickase activities on opposite strands (FIG. 8D) or of a new cleavase activity generating a second DSB (FIG. 8E) can result in a double-strand gap. As a consequence, perfect religation is not possible anymore, and one or several alternative repair outcomes such as imprecise NHEJ, Homologous Recombination or SSA for instance, can be stimulated. As another non-limiting example, the addition of a single nickase activity can result in a single strand gap, and suppress the cohesivity of the ends, which can also enhances the efficiency of the resulting enhanced compact TALEN at a genomic locus of interest, according to the invention, via stimulation of one or several alternative repair outcomes mentioned above.

[0180] In this aspect of the present invention, enhancement of DNA processing efficiency of a compact TALEN refers to the increase in the detected level of said DNA processing efficiency, against a target DNA sequence, of a compact TALEN in comparison to the activity of a first compact TALEN against the same target DNA sequence. Said first compact TALEN can be a starting compact TALEN, or a compact TALEN that has already been engineered or an enhanced compact TALEN according to the present invention. Several rounds of enhancement can be envisioned from a starting compact TALEN or from a starting enhanced compact TALEN.

[0181] In this aspect of the present invention, enhancement of the DNA processing efficiency of the compact TALEN entity (or enhanced compact TALEN) refers to the increase in the detected level of said DNA processing efficiency against a target DNA sequence of interest or nearby said DNA sequence of interest in comparison to the efficiency of a first compact TALEN or starting compact TALEN against or nearby the same target DNA sequence. In this case, the starting compact TALEN is taken as the reference scaffold to measure the DNA processing efficiency. Said enhanced compact TALEN is an engineered compact TALEN comprising an enhancer domain according to this aspect of the invention. Said enhanced compact TALEN can also be taken as a reference scaffold for further enhancement in said DNA processing efficiency. As a non-limiting example, said DNA processing efficiency can result from a cleavage-induced recombination generated by said enhanced compact TALEN. In this case, said level of cleavage-induced recombination can be determined, for instance, by a cell-based recombination assay as described in the International PCT Application WO 2004/067736. Importantly, enhancement of efficacy in cells (enhanced generation of targeted mutagenesis or targeted recombination) can be, but is not necessarily associated with an enhancement of the cleavage activity that could be detected in certain in vitro assays. For example, additional phosphodiesterase activities as described in FIG. 8 could barely affect the cleavage profile, as detected by in vitro cleavage and separation of the cleavage products on an electrophoresis gel. However, as explained above, and in the legend of FIG. 8, the DSB ends generated in this way could be more prone to induce detectable genomic rearrangements such as targeted mutagenesis (by imprecise NHEJ) or homologous recombination. Said enhancement in cleavage-induced recombination of said enhanced compact TALEN is at least a 5% enhancement compared to the starting scaffold or starting compact TALEN, more preferably at least a 10% enhancement, again more preferably at least a 15% enhancement, again more preferably at least a 20% enhancement, again more preferably at least a 25% enhancement, again more preferably a 50% enhancement, again more preferably a enhancement greater than 50%, resulting in an enhancement of DNA processing efficiency of said enhanced compact TALEN of at least 5% compared to the starting scaffold or starting compact TALEN, more preferably at least a 10% enhancement, again more preferably at least a 15% enhancement, again more preferably at least a 20% enhancement, again more preferably at least a 25% enhancement, again more preferably a 50% enhancement, again more preferably a enhancement greater than 50%.

[0182] In another preferred embodiment according to the method of the present invention, the peptidic linker that can link said enhancer domain to one part of said compact TALEN entity according to the method of the present invention can be selected from the group consisting of NFS1, NFS2, CFS1, RM2, BQY, QGPSG, LGPDGRKA, 1a8h_{—}1, 1dnpA_{—}1, 1d8cA_{—}2, 1ckqA_{—}3, 1sbp_{—}1, 1ev7A_{—}1, 1alo_{—}3, 1amf_{—}1, 1adjA_{—}3, 1fcdC_{—}1, 1a13_{—}2, 1g3p_{—}1, 1acc_{—}3, 1ahjB_{—}1, 1acc_{—}1, 1af7_{—}1, 1heiA_{—}1, 1bia_{—}2, 1igtB_{—}1, 1nfkA_{—}1, 1au7A_{—}1, 1 bpoB_{—}1, 1b0pA_{—}2, 1c05A_{—}2, 1gcb_{—}1, 1bt3A_{—}1, 1b3oB_{—}2, 16vpA_{—}6, 1dhx_{—}1, 1b8aA_{—}1 and 1qu6A_{—}1 as listed in table 3 (SEQ ID NO: 67 to SEQ ID NO: 104 and SEQ ID NO: 372 to SEQ ID NO: 415). In a more preferred embodiment, the peptidic linker that can said enhancer domain to one part of said compact TALEN entity according to the method of the present invention can be selected from the group consisting of NFS1 (SEQ ID NO: 98), NFS2 (SEQ ID NO: 99) and CFS1 (SEQ ID NO: 100). In the scope of the present invention is also encompassed the case where a peptidic linker is not needed to fuse one enhancer domain to one part of said compact TALEN entity in order to obtain a enhanced compact TALEN according to the present invention.

[0183] Depending from its structural composition [type of core TALE scaffold, type of catalytic domain(s) with associated enzymatic activities, type of enhancers and eventually type of linker(s)], a compact TALEN or an enhanced compact TALEN according to the present invention can comprise different levels of separate enzymatic activities able to differently process DNA as mentioned above. By adding new enzymatic activities to said compact TALEN or enhanced compact TALEN or enhancing the DNA processing efficiency of one or several of its constitutive enzymatic activities, one can enhance the global DNA processing efficiency of one compact TALEN or enhanced compact TALEN in comparison to a starting compact TALEN or enhanced compact TALEN.

[0184] According to the present invention, compact TALENs are designed to alleviate the need for multiple independent protein moieties when targeting a DNA processing event. Importantly, the requisite “spacer” region and dual target sites essential for the function of current TALENs are unnecessary, as compact TALENs according to the invention comprises a core TALE scaffold containing only one DNA binding domain to target a specific single double-stranded DNA target sequence of interest and process DNA nearby said single double-stranded DNA target sequence of interest. As each end of the core TALE scaffold is amenable to fusion, the order (N- v.s C-terminal) of addition of the catalytic and enhancement domains can vary with the application. In addition, since the catalytic domain does not require specific DNA contacts, there are no restrictions on regions surrounding the core TALE scaffold, as non-limiting examples depicted in FIG. 5: (A) N-terminal fusion construct to promote Homologous recombination induced by a cleavase domain or by a nickase domain. (B) C-terminal fusion construct with properties as in (A). (C) The attachment of two catalytic domains to both ends of the core TALE scaffold allows for dual cleavage with enhancement in NHEJ. Fusion junctions (N-vs. C-terminal) and linker designs can vary with the application.

[0185] According to the present invention, compact TALENs can be enhanced through the addition of a domain to promote existing or alternate activities as non-limiting examples depicted in FIG. 6: (A) A standard compact TALEN with an enhancer domain fused to the C-terminus of its core TALE scaffold part. (B) The enhancer domain is fused to the compact TALEN via the N-terminus of its catalytic domain part. Such a configuration can be used to assist and/or anchor the catalytic domain part near the DNA to increase DNA processing activity. (C) The enhancer domain is sandwiched between the catalytic domain part and the core TALE scaffold part. The enhancer domain can promote communication between the flanking domains (i.e. to assist in catalysis and/or DNA binding) or can be used to overcome the requisite T nucleotide at position −1 of all TALE-based targets. (D) The enhancer domain is used to functionally replace the engineered core TALE scaffold N-terminal region. (E) The enhancer domain is used to functionally replace the engineered core TALE scaffold C-terminal region. Fusion junctions (N-vs. C-terminal) and linker designs can vary with the application.

[0186] According to the present invention, the nature of the catalytic domain(s) comprised in the compact TALEN and the enhanced compact TALEN is application dependent. As a non-limiting example, a nickase domain should allow for a higher HR/NHEJ ratio than a cleavase domain, thereby being more agreeable for therapeutic applications (McConnell Smith, Takeuchi et al. 2009; Metzger, McConnell-Smith et al. 2011). For example, the coupling of a cleavase domain on one side with a nickase domain on the other could result in excision of a single-strand of DNA spanning the binding region of a compact TALEN. The targeted generation of extended single-strand overhangs could be applied in applications that target DNA repair mechanisms. For targeted gene inactivation, the use of two cleavase domains is then preferred. In another preferred embodiment, the use of two nickase domains can be favored. Furthermore, the invention relates to a method for generating several distinct types of compact TALENs that can be applied to applications ranging from targeted DNA cleavage to targeted gene regulation.

[0187] The present invention also relates to methods for use of said compact TALENs according to the invention for various applications ranging from targeted DNA cleavage to targeted gene regulation. In a preferred embodiment, the present invention relates to a method for increasing targeted HR (and NHEJ) when Double-Strand break activity is promoted in a compact TALEN targeting a DNA target sequence according to the invention. In another more preferred embodiment, the addition of at least two catalytically active cleavase enhancer domains according to the invention allows to increase Double-strand break-induced mutagenesis by leading to a loss of genetic information and preventing any scarless re-ligation of targeted genomic locus of interest by NHEJ.

[0188] In another preferred embodiment, the present invention relates to a method for increasing targeted HR with less NHEJ (i.e. in a more conservative fashion) when Single-Strand Break activity is promoted in a compact TALEN targeting a DNA target sequence according to the invention.

[0189] In another preferred embodiment, the present invention relates to a method for increasing excision of a single-strand of DNA spanning the binding region of a compact TALEN when both one cleavase enhancer domain and one nickase enhancer domain, respectively, are fused to both N-terminus and C-terminus of a core TALE scaffold according to the invention.

[0190] In another preferred embodiment, the present invention relates to a method for treatment of a genetic disease caused by a mutation in a specific single double-stranded DNA target sequence in a gene, comprising administering to a subject in need thereof an effective amount of a variant of a compact TALEN according to the present invention.

[0191] In another preferred embodiment, the present invention relates to a method for inserting a transgene into a specific single double-stranded DNA target sequence of a genomic locus of a cell, tissue or non-human animal, or a plant wherein at least one compact TALEN of the present invention is transitory or not introduced into said cell, tissue, non-human animal or plant.

[0192] In another embodiment, the present invention relates to a method to modulate the activity of a compact TALEN when expressed in a cell wherein said method comprises the step of introducing in said cell an auxiliary domain modulating the activity of said compact TALEN. In a preferred embodiment, the present invention relates to a method which allows to have a temporal control of activity of a compact TALEN when expressed in a cell by introducing in said cell an auxiliary domain modulating the activity of said compact TALEN once said compact TALEN achieved its activity (DNA cleavage, DNA nicking or other DNA processing activities). In a preferred embodiment, the present invention relates to a method to inhibit the activity of a compact TALEN when expressed in a cell wherein said method comprises the step of introducing in said cell an auxiliary domain inhibiting the activity of said compact TALEN. In a more preferred embodiment, the catalytic domain of said compact TALEN is NucA (SEQ ID NO: 26) and said auxiliary domain is NuiA (SEQ ID NO: 229), a functional mutant, a variant or a derivative thereof. In another more preferred embodiment, the catalytic domain of said compact TALEN is ColE7 (SEQ ID NO: 11) and said auxiliary domain is Im7 (SEQ ID NO: 230), a functional mutant, a variant or a derivative thereof.

[0193] Is also encompassed in the scope of the present invention a recombinant polynucleotide encoding a compact TALEN, a dual compact TALEN, or an enhanced compact TALEN according to the present invention. Is also encompassed in the scope of the present invention, a vector comprising a recombinant polynucleotide encoding for a compact TALEN or an enhanced compact TALEN according to the present invention.

[0194] Is also encompassed in the scope of the present invention, a host cell which comprises a vector and/or a recombinant polynucleotide encoding for a compact TALEN or an enhanced compact TALEN according to the present invention.

[0195] Is also encompassed in the scope of the present invention, a non-human transgenic animal comprising a vector and/or a recombinant polynucleotide encoding for a compact TALEN or an enhanced compact TALEN according to the present invention.

[0196] Is also encompassed in the scope of the present invention, a transgenic plant comprising a vector and/or a recombinant polynucleotide encoding for a compact TALEN or an enhanced compact TALEN according to the present invention.

[0197] The present invention also relates to kits used to implement the method according to the present invention. More preferably, is encompassed in the scope of the present invention, a kit comprising a compact TALEN or an enhanced compact TALEN according to the present invention and instructions for use said kit in enhancing DNA processing efficiency of a single double-stranded DNA target sequence of interest.

[0198] For purposes of therapy, the compact TALENs of the present invention and a pharmaceutically acceptable excipient are administered in a therapeutically effective amount. Such a combination is said to be administered in a “therapeutically effective amount” if the amount administered is physiologically significant. An agent is physiologically significant if its presence results in a detectable change in the physiology of the recipient. In the present context, an agent is physiologically significant if its presence results in a decrease in the severity of one or more symptoms of the targeted disease and in a genome correction of the lesion or abnormality. Vectors comprising targeting DNA and/or nucleic acid encoding a compact TALEN can be introduced into a cell by a variety of methods (e.g., injection, direct uptake, projectile bombardment, liposomes, electroporation). Compact TALENs can be stably or transiently expressed into cells using expression vectors. Techniques of expression in eukaryotic cells are well known to those in the art. (See Current Protocols in Human Genetics: Chapter 12 “Vectors For Gene Therapy” & Chapter 13 “Delivery Systems for Gene Therapy”).

[0199] In one further aspect of the present invention, the compact TALEN of the present invention is substantially non-immunogenic, i.e., engender little or no adverse immunological response. A variety of methods for ameliorating or eliminating deleterious immunological reactions of this sort can be used in accordance with the invention. In a preferred embodiment, the compact TALEN is substantially free of N-formyl methionine. Another way to avoid unwanted immunological reactions is to conjugate compact TALEN to polyethylene glycol (“PEG”) or polypropylene glycol (“PPG”) (preferably of 500 to 20,000 daltons average molecular weight (MW)). Conjugation with PEG or PPG, as described by Davis et al. (U.S. Pat. No. 4,179,337) for example, can provide non-immunogenic, physiologically active, water soluble compact TALEN conjugates with anti-viral activity. Similar methods also using a polyethylene—polypropylene glycol copolymer are described in Saifer et al. (U.S. Pat. No. 5,006,333).

[0200] In another aspect of the present invention is a composition comprising a compact TALEN or an enhanced compact TALEN according to the present invention and a carrier. More preferably, is a pharmaceutical composition comprising a compact TALEN or an enhanced compact TALEN according to the present invention and a pharmaceutically active carrier known in the state of the art.

[0201] In the scope of the present invention and for all the applications mentioned above, it can be envisioned to use more than one compact TALEN (i.e. one compact TALEN active entity) or more than one enhanced compact TALENs (i.e. one enhanced compact TALEN active entity) for DNA processing according to the invention. In a preferred embodiment, two different compact TALENs or two enhanced compact TALENs can be used. In this embodiment, as non-limiting examples, said two different compact TALENs can comprise the same core TALE scaffold or not; said two different compact TALENs can comprise the same set of Repeat Variable Dipeptides or not; said two different compact TALENs can comprise the same catalytic domain or not. When two identical compact TALENs active entities are used for DNA processing according to the invention, they can be considered as a homodimeric pair of compact TALENs active entities. When two non identical compact TALENs active entities are used for DNA processing according to the invention, they can be considered as a heterodimeric pair of compact TALENs active entities. As non-limiting example, when two compact TALEN according to the present invention are used, one of the compact TALEN can modulate the activity of the other one, leading for instance to an enhanced DNA processing event compared to the same DNA processing event achieved by only one compact TALEN; in this non-limiting example, a Trans-TALEN modulates and enhances the catalytic activity of an initial compact TALEN.

[0202] In another preferred embodiment, three compact TALENs or three enhanced compact TALENs can be used. In another preferred embodiment, more than three compact TALENs or three enhanced compact TALENs can be used for DNA processing according to the invention. In another preferred embodiment, a combination of compact TALENs and enhanced compact TALENs can be used for DNA processing according to the invention. As a non-limiting example, one compact TALEN and one enhanced compact TALEN can be used. As another non-limiting example, one compact TALEN and one dual-cleavage compact TALEN can be used. In another preferred embodiment, a combination of compact TALENs, enhanced compact TALENs and dual-cleavage compact TALENs can be used, said compact TALENs comprising the same catalytic domain or not, the same core TALE scaffold or not. When several compact TALENs have to be used, DNA target sequence for each compact TALENs of the combination to be used can be located on a same endogenous genomic DNA locus of interest or not. Said DNA target sequences can be located at an approximative distance of 1000 base pairs (bps). More preferably, said DNA target sequences can be located at an approximative distance of 500 bps or 200 bps, or 100 bps, or 50 bps, or bps, 19 bps, 18 bps, 17 bps, 16 bps, 15 bps, 14 bps, 13 bps, 12 bps, 11 bps, 10 bps, 9 bps, 8 bps, 7 bps, 6 bps, 5 bps, 4 bps, 3 bps, 2 bps, 1 bp. Said DNA target sequences located at distances mentioned above are “nearby” DNA sequences in reference to the target DNA sequence for DNA processing according to the present invention.

[0203] In another preferred embodiment, two compact TALENs active entities can be used as a way of achieving two different DNA processing activities nearby a DNA target sequence according to the invention. As a non-limiting example, two compact TALENs targeting said DNA sequence or DNA sequences nearby said targeted DNA sequence and comprising each one a nickase-derived catalytic domain can be used; in this case, this use of two compact TALENs active entities can represent an alternative way of achieving a Double Strand Break nearby a said DNA target sequence, compared to the use of one compact TALEN targeting said DNA sequence and comprising a cleavase-derived catalytic domain, or not. As another non-limiting example, one compact TALEN comprising a cleavase-derived domain and one compact TALEN comprising an exonuclease-derived domain can be used to make a Double Strand Break and create a gap, respectively, to achieve an imprecise NHEJ event at the genomic locus of interest comprising said DNA target sequence. In this case, even if each compact TALEN forming this heterodimeric pair of compact TALENs is active by itself, each of these active entities is dependent of the other one to achieve the wanted resulting DNA processing activity. Indeed, in this particular case, the wanted resulting activity is a gap created by the exonuclease activity, said exonuclease activity being possible only from the Double Strand Break achieved by the cleavase domain of the other compact TALENs. In the scope of the present invention, is also envisioned the case where two identical compact TALEN active entities (a homodimeric pair of compact TALENs) are dependent each other to achieve a wanted resulting DNA processing activity.

### DEFINITIONS

[0204] Amino acid residues in a polypeptide sequence are designated herein according to the one-letter code, in which, for example, Q means Gln or Glutamine residue, R means Arg or Arginine residue and D means Asp or Aspartic acid residue.
[0205] Amino acid substitution means the replacement of one amino acid residue with another, for instance the replacement of an Arginine residue with a Glutamine residue in a peptide sequence is an amino acid substitution.
[0206] Enhanced/increased/improved DNA processing activity, refers to an increase in the detected level of a given compact TALEN or enhanced compact TALEN associated DNA processing activity against a target DNA sequence or DNA target sequence by a second compact TALEN or enhanced compact TALEN in comparison to the activity of a first compact TALEN or enhanced compact TALEN against the target DNA sequence. The second compact TALEN or enhanced compact TALEN can be a variant of the first one and can comprise one or more substituted amino acid residues in comparison to the first compact TALEN or enhanced compact TALEN. The second compact TALEN or enhanced compact TALEN can be a variant of the first one and can comprise one or more catalytic and/or enhancer domains in comparison to said first compact TALEN or enhanced compact TALEN. This definition more broadly applies for other endonucleases and rare-cutting endonucleases.
[0207] DNA processing activity refers to a particular/given enzymatic activity of said compact TALEN or enhanced compact TALEN or more broadly to qualify the enzymatic activity of a rare-cutting endonuclease. Said DNA processing activity can refer to a cleavage activity, either a cleavase activity either a nickase activity, more broadly a nuclease activity but also a polymerase activity, a kinase activity, a phosphatase activity, a methylase activity, a topoisomerase activity, an integrase activity, a transposase activity or a ligase activity as non-limiting examples. In the scope of this definition, said given DNA processing activity of a particular enzymatic activity can also be described as DNA processing efficiency of said particular enzymatic activity. Methods for enhancing compact TALEN or enhanced compact TALEN DNA processing activity according to this definition are encompassed in the present invention.
[0208] Global DNA processing efficiency describes, for a compact TALEN or an enhanced compact TALEN according to the present invention, the global resultant or the overall effect of different separate enzymatic activities that said compact TALEN or enhanced compact TALEN can comprise. According to these different separate enzymatic activities, a compact TALEN or an enhanced compact TALEN presents a global capacity to process DNA nearby a target sequence in a genomic locus of interest, i.e. a global DNA processing efficiency. Said global DNA processing efficiency can qualify or rank a second given compact TALEN or enhanced compact TALEN in comparison to a first given compact TALEN or enhanced compact TALEN. Depending on said compact TALENs or enhanced compact TALENs structural composition [type of core TALE scaffold, type of catalytic domain(s) with associated enzymatic activities, eventually type of linker(s) and type of enhancer(s) domains], said global DNA processing efficiency can refer to only one enzymatic activity, two enzymatic activities, three enzymatic activities, four enzymatic activities or more than four enzymatic activities. Said global DNA processing efficiency can refer to the sum of individual enzymatic activities. Said global DNA processing efficiency can refer to the synergy or combined effect of different enzymatic activities comprised in a given compact TALEN or enhanced compact TALEN. An enhancement of the DNA processing efficiency of a compact TALEN according to the present invention can reflect a synergy, an enhanced combined effect, resulting in an enhanced compact TALEN characterized by a global DNA processing efficiency that is greater than the sum of respective DNA processing efficiencies of separate starting compact TALEN or than the sum of respective DNA processing efficiencies of separate enzymatic activities comprised in a same starting compact TALEN.
[0209] Efficiency of a rare-cutting endonuclease according to the present invention is the property for said rare-cutting endonuclease of producing a desired event. This desired event can be for example Homologous gene targeting, targeted mutagenesis, or sequence removal or excision. The efficiency of the desired event depends on several parameters, including the specific activity of the nuclease and the repair pathway(s) resulting in the desired event (efficacy of homologous repair for gene targeting, efficacy and outcome of NHEJ pathways for targeted mutagenesis). Efficiency of a rare cutting endonuclease for a locus is intended to mean its ability to produce a desired event at this locus. Efficiency of a rare cutting endonuclease for a target is intended to mean its ability to produce a desired event as a consequence of cleavage of this target.
[0210] Nucleotides are designated as follows: one-letter code is used for designating the base of a nucleoside: a is adenine, t is thymine, c is cytosine, and g is guanine. For the degenerated nucleotides, r represents g or a (purine nucleotides), k represents g or t, s represents g or c, w represents a or t, m represents a or c, y represents t or c (pyrimidine nucleotides), d represents g, a or t, v represents g, a or c, b represents g, t or c, h represents a, t or c, and n represents g, a, t or c.
[0211] by “meganuclease”, is intended a rare-cutting endonuclease subtype having a double-stranded DNA target sequence greater than 12 bp. Said meganuclease is either a dimeric enzyme, wherein each domain is on a monomer or a monomeric enzyme comprising the two domains on a single polypeptide.
[0212] by “meganuclease domain” is intended the region which interacts with one half of the DNA target of a meganuclease and is able to associate with the other domain of the same meganuclease which interacts with the other half of the DNA target to form a functional meganuclease able to cleave said DNA target.
[0213] by “endonuclease variant”, “rare-cutting endonuclease variant”, “chimeric rare-cutting endonuclease variant” or “meganuclease variant” or “compact TALEN variant”, or “enhanced compact TALEN variant” or “dual cleavage compact TALEN variant” or “variant” it is intended an endonuclease, rare-cutting endonuclease, chimeric rare-cutting endonuclease, meganuclease, or compact TALEN, enhanced compact TALEN, dual cleavage compact TALEN obtained by replacement of at least one residue in the amino acid sequence of the parent endonuclease, rare-cutting endonuclease, chimeric rare-cutting endonuclease, meganuclease or compact TALEN, enhanced compact TALEN, dual cleavage compact TALEN with at least a different amino acid. “Variant” designation also applies for instance for an enhanced compact TALEN comprising at least one supplementary protein domain (catalytic or enhancer domain) in comparison to the starting compact TALEN entity. Are also encompassed in the scope of the present definition, variants and protein domains comprised in these variants which present a sequence with high percentage of identity or high percentage of homology with sequences of compact TALENs, enhanced compact TALENs, dual-cleavage compact TALENs or protein domains and polypeptides according to the present invention, at nucleotidic or polypeptidic levels. By high percentage of identity or high percentage of homology it is intended 60%, more preferably 70%, more preferably 75%, more preferably 80%, more preferably 85%, more preferably 90%, more preferably 95, more preferably 97%, more preferably 99% or any integer comprised between 60% and 99%.
[0214] by “peptide linker”, “peptidic linker” or “peptide spacer” it is intended to mean a peptide sequence which allows the connection of different monomers in a fusion protein and the adoption of the correct conformation for said fusion protein activity and which does not alter the specificity of either of the monomers for their targets. Peptide linkers can be of various sizes, from 3 amino acids to 50 amino acids as a non limiting indicative range. Peptide linkers can also be structured or unstructured.
[0215] by “related to”, particularly in the expression “one cell type related to the chosen cell type or organism”, is intended a cell type or an organism sharing characteristics with said chosen cell type or said chosen organism; this cell type or organism related to the chosen cell type or organism, can be derived from said chosen cell type or organism or not.
[0216] by “subdomain” it is intended the region of a LAGLIDADG homing endonuclease core domain which interacts with a distinct part of a homing endonuclease DNA target half-site.
[0217] by “targeting DNA construct/minimal repair matrix/repair matrix” it is intended to mean a DNA construct comprising a first and second portion that are homologous to regions 5′ and 3′ of the DNA target in situ. The DNA construct also comprises a third portion positioned between the first and second portion which comprise some homology with the corresponding DNA sequence in situ or alternatively comprise no homology with the regions 5′ and 3′ of the DNA target in situ. Following cleavage of the DNA target, a homologous recombination event is stimulated between the genome containing the targeted gene comprised in the locus of interest and the repair matrix, wherein the genomic sequence containing the DNA target is replaced by the third portion of the repair matrix and a variable part of the first and second portions of the repair matrix.
[0218] by “functional variant” is intended a catalytically active variant of a protein, such variant can have additional properties compared to its parent protein. As a non-limiting example, a functional variant of a meganuclease can be able to cleave a DNA target sequence, preferably said target being a new target which is not cleaved by the parent meganuclease. This definition also applies to compact TALENs, enhanced compact TALENs, dual-cleavage compact TALENs or protein domains that constitute such TALENs according to the present invention. Are also encompassed in the scope of the present definition, functional variants, polypeptides and protein domains comprised in these molecules which present a sequence with high percentage of identity or high percentage of homology with sequences of compact TALENs, enhanced compact TALENs, dual-cleavage compact TALENs or protein domains and polypeptides according to the present invention, at nucleotidic or polypeptidic levels. By high percentage of identity or high percentage of homology it is intended 60%, more preferably 70%, more preferably 75%, more preferably 80%, more preferably 85%, more preferably 90%, more preferably 95, more preferably 97%, more preferably 99% or any integer comprised between 60% and 99%.
[0219] by “derived from” or “derivative(s)” it is intended to mean for instance a meganuclease variant which is created from a parent meganuclease and hence the peptide sequence of the meganuclease variant is related to (primary sequence level) but derived from (mutations) the peptide sequence of the parent meganuclease. In this definition, mutations encompass deletions or insertions of several amino acid residues; as non-limiting example, a truncated variant of an I-CreI meganuclease is considered as a scaffold derived from I-CreI meganuclease. This expression can also apply to compact TALENs, enhanced compact TALENs, dual-cleavage compact TALENs or protein domains that constitute such TALENs according to the present invention. Are also encompassed in the scope of the present definition, derivatives of compact TALENs, enhanced compact TALENs, dual-cleavage compact TALENs or protein domains and derivatives of polypeptides according to the present invention which present a sequence with high percentage of identity or high percentage of homology with sequences of compact TALENs, enhanced compact TALENs, dual-cleavage compact TALENs or protein domains and polypeptides according to the present invention, at nucleotidic or polypeptidic levels. By high percentage of identity or high percentage of homology it is intended 60%, more preferably 70%, more preferably 75%, more preferably 80%, more preferably 85%, more preferably 90%, more preferably 95, more preferably 97%, more preferably 99% or any integer comprised between 60% and 99%.
[0220] by “I-CreI” is intended the wild-type I-CreI having the sequence of pdb accession code 1g9y, corresponding to the sequence SEQ ID NO: 1 in the sequence listing. In the present patent application, I-CreI variants described can comprise an additional Alanine after the first Methionine of the wild type I-CreI sequence (SEQ ID NO: 1). These variants may also comprise two additional Alanine residues and an Aspartic Acid residue after the final Proline of the wild type I-CreI sequence as shown in SEQ ID NO: 106. These additional residues do not affect the properties of the enzyme and to avoid confusion these additional residues do not affect the numeration of the residues in I-CreI or a variant referred in the present patent application, as these references exclusively refer to residues of the wild type I-CreI enzyme (SEQ ID NO: 1) as present in the variant, so for instance residue 2 of I-CreI is in fact residue 3 of a variant which comprises an additional Alanine after the first Methionine.
[0221] by compact TALEN, enhanced compact TALEN, dual-cleavage compact TALEN with novel specificity is intended a variant of these proteins having a pattern of cleaved targets different from that of their respective parent compact TALENs, enhanced compact TALENs, dual-cleavage compact TALENs. The terms “novel specificity”, “modified specificity”, “novel cleavage specificity”, “novel substrate specificity” which are equivalent and used indifferently, refer to the specificity of the variant towards the nucleotides of the DNA target sequence.
[0222] by “I-CreI site” is intended a 22 to 24 by double-stranded DNA sequence which is cleaved by I-Crel. I-CreI sites include the wild-type non-palindromic I-CreI homing site and the derived palindromic sequences such as the sequence 5′-t₋₁₂c₋₁₁a₋₁₀a₋₉a₋₈a₋₇c₋₆g₋₅t₋₄c₋₃g₋₂t₋₁a₊₁c₊₂g₊₃a₊₄c₊₅g₊₆t₊₇t₊₈t₊₉t₊₁₀g₊₁₁a₊₁₂ (SEQ ID NO: 2), also called C1221 or C1221 target.
[0223] by “domain” or “core domain” is intended the “LAGLIDADG homing endonuclease core domain” which is the characteristic 413413a fold of the homing endonucleases of the LAGLIDADG family, corresponding to a sequence of about one hundred amino acid residues. Said domain comprises four beta-strands (β₁β₂β₃β₄) folded in an anti-parallel beta-sheet which interacts with one half of the DNA target. This domain is able to associate with another LAGLIDADG homing endonuclease core domain which interacts with the other half of the DNA target to form a functional endonuclease able to cleave said DNA target. For example, in the case of the dimeric homing endonuclease I-CreI (163 amino acids), the LAGLIDADG homing endonuclease core domain corresponds to the residues 6 to 94.
[0224] by “beta-hairpin” is intended two consecutive beta-strands of the antiparallel beta-sheet of a LAGLIDADG homing endonuclease core domain (β₁β₂ or β₃β₄) which are connected by a loop or a turn.
[0225] by “single-chain meganuclease”, “single-chain chimeric meganuclease”, “single-chain meganuclease derivative”, “single-chain chimeric mega nuclease derivative” or “single-chain derivative” is intended a meganuclease comprising two LAGLIDADG homing endonuclease domains or core domains linked by a peptidic spacer. The single-chain meganuclease is able to cleave a chimeric DNA target sequence comprising one different half of each parent meganuclease target sequence.
[0226] by “DNA target”, “DNA target sequence”, “target DNA sequence”, “target sequence”, “target-site”, “target”, “site”, “site of interest”, “recognition site”, “polynucleotide recognition site”, “recognition sequence”, “homing recognition site”, “homing site”, “cleavage site” is intended a double-stranded palindromic, partially palindromic (pseudo-palindromic) or non-palindromic polynucleotide sequence that is recognized and can be cleaved by a LAGLIDADG homing endonuclease such as I-Crel, or a variant, or a single-chain chimeric meganuclease derived from I-Crel. Said DNA target sequence can be qualified as “cleavable” by an endonuclease, rare-cutting endonuclease, chimeric rare-cutting endonuclease or meganuclease when recognized within a genomic sequence and known to correspond to the DNA target sequence of a given endonuclease, rare-cutting endonuclease, chimeric rare-cutting endonuclease or meganuclease or a variant of such endonuclease, rare-cutting endonuclease, chimeric rare-cutting endonuclease or meganuclease. These terms refer to a specific DNA location, preferably a genomic location, but also a portion of genetic material that can exist independently to the main body of genetic material such as plasmids, episomes, virus, transposons or in organelles such as mitochondria or chloroplasts as non-limiting examples, at which a double stranded break (cleavage) can be induced by the endonuclease, rare-cutting endonuclease, chimeric rare-cutting endonuclease or meganuclease. For the LAGLIDADG subfamily of rare-cutting endonucleases, the DNA target is defined by the 5′ to 3′ sequence of one strand of the double-stranded polynucleotide, as indicate above for C1221 (SEQ ID NO: 2). Cleavage of the DNA target can occur at the nucleotides at positions +2 and −2, respectively for the sense and the antisense strand. Unless otherwise indicated, the position at which cleavage of the DNA target by an I-CreI-derived variant can occur, corresponds to the cleavage site on the sense strand of the DNA target. In the particular case of compact TALENs, a subclass of chimeric rare-cutting endonucleases, the following expressions “DNA target”, “DNA target sequence”, “target DNA sequence”, “target sequence”, “target-site”, “target”, “site”, “site of interest”, “recognition site”, “polynucleotide recognition site”, and “recognition sequence” can apply to qualify their specific DNA target sequence with the particularity that said specific DNA target sequence recognized by the compact TALEN according to the invention is the one or not that is processed and/or cut by the compact TALEN. A compact TALEN, an enhanced compact TALEN or a dual cleavage compact TALEN according to the present invention can process and/or cut DNA within said specific DNA target sequence. A compact TALEN, an enhanced compact TALEN or a dual cleavage compact TALEN can also process and/or cut DNA outside said specific DNA target sequence.
[0227] By “DNA nearby said specific DNA target sequence” or by “DNA nearby” is intended DNA sequence or sequences located within or outside said specific DNA target sequence. Are also intended DNA sequence or sequences bound by a compact TALEN or an enhanced compact TALEN at said specific DNA target sequence location or DNA located at a 5′ or 3′ distance of 1-100 base pairs (bps), 1-50 base pairs (bps) or 1-25 base pairs (bps) from said specific DNA target sequence.

[0228] When several compact TALENs have to be used in a particular genome engineering application, DNA target sequence for each compact TALENs of the combination to be used can be located on a same endogenous genomic DNA locus of interest or not. Said DNA target sequences can be located at an approximative distance of 1-1000 base pairs (bps), more preferably 1-500 bps, more preferably 1-100 bps, more preferably 1-100 bps, more preferably 1-50 bps, more preferably 1-25 bps, more preferably 1-10 bps. In another embodiment, said DNA target sequence for each compact TALENs of the combination to be used can be located on the same DNA strand or not. Said DNA target sequences located at distances mentioned above are “nearby” DNA sequences in reference to the target DNA sequence for DNA processing according to the present invention.
[0229] by “single double-stranded DNA target sequence” is intended a compact-TALEN or enhanced compact TALEN or dual-cleavage compact TALEN binding site. The recognition DNA binding site of a compact-TALEN or enhanced compact TALEN or dual-cleavage compact TALEN can be ranging from 12 to 100 base pairs (bp) in length, usually greater than 12 bps in length.
   [0230] by “DNA target half-site”, “half cleavage site” or half-site” is intended the portion of the DNA target which is bound by each LAGLIDADG homing endonuclease core domain.
   [0231] The term “endonuclease” refers to any wild-type or variant enzyme capable of catalyzing the hydrolysis (cleavage) of bonds between nucleic acids within a DNA or RNA molecule, preferably a DNA molecule. Endonucleases can be classified as rare-cutting endonucleases when having typically a polynucleotide recognition greater than 12 base pairs (bp) in length, more preferably of 14-45 bp. Rare-cutting endonucleases significantly increase HR by inducing DNA double-strand breaks (DSBs) at a defined locus (Rouet, Smih et al. 1994; Rouet, Smih et al. 1994; Choulika, Perrin et al. 1995; Pingoud and Silva 2007). Rare-cutting endonucleases can for example be a homing endonuclease (Paques and Duchateau 2007), a chimeric Zinc-Finger nuclease (ZFN) resulting from the fusion of engineered zinc-finger domains with the catalytic domain of a restriction enzyme such as FokI (Porteus and Carroll 2005) or a chemical endonuclease (Eisenschmidt, Lanio et al. 2005; Arimondo, Thomas et al. 2006; Simon, Cannata et al. 2008). In chemical endonucleases, a chemical or peptidic cleaver is conjugated either to a polymer of nucleic acids or to another DNA recognizing a specific target sequence, thereby targeting the cleavage activity to a specific sequence. Chemical endonucleases also encompass synthetic nucleases like conjugates of orthophenanthroline, a DNA cleaving molecule, and triplex-forming oligonucleotides (TFOs), known to bind specific DNA sequences (Kalish and Glazer 2005). Such chemical endonucleases are comprised in the term “endonuclease” according to the present invention.

[0232] Rare-cutting endonucleases can also be for example TALENs, a new class of chimeric nucleases using a FokI catalytic domain and a DNA binding domain derived from Transcription Activator Like Effector (TALE), a family of proteins used in the infection process by plant pathogens of the Xanthomonas genus (Boch, Scholze et al. 2009; Boch, Scholze et al. 2009; Moscou and Bogdanove 2009; Moscou and Bogdanove 2009; Christian, Cermak et al. 2010; Christian, Cermak et al. 2010; Li, Huang et al. 2010; Li, Huang et al. 2011). The functional layout of a FokI-based TALE-nuclease (TALEN) is essentially that of a ZFN, with the Zinc-finger DNA binding domain being replaced by the TALE domain. As such, DNA cleavage by a TALEN requires two DNA recognition regions flanking an unspecific central region. Rare-cutting endonucleases encompassed in the present invention can also be derived from TALENs. The authors of the present invention have developed a new type of TALENs that can be engineered to specifically recognize and process target DNA efficiently. These novel “compact TALENs” (cTALENs) do not require dimerization for DNA processing activity, thereby alleviating the need for “dual” target sites with intervening DNA “spacers”; these compact TALENs can be seen as one subclass of rare-cutting endonucleases or chimeric rare-cutting endonucleases according to the present invention.

[0233] Rare-cutting endonuclease can be a homing endonuclease, also known under the name of meganuclease. Such homing endonucleases are well-known to the art (Stoddard 2005). Homing endonucleases recognize a DNA target sequence and generate a single- or double-strand break. Homing endonucleases are highly specific, recognizing DNA target sites ranging from 12 to 45 base pairs (bp) in length, usually ranging from 14 to 40 by in length. The homing endonuclease according to the invention may for example correspond to a LAGLIDADG endonuclease, to a HNH endonuclease, or to a GIY-YIG endonuclease.

[0234] In the wild, meganucleases are essentially represented by homing endonucleases. Homing Endonucleases (HEs) are a widespread family of natural meganucleases including hundreds of proteins families (Chevalier and Stoddard 2001). These proteins are encoded by mobile genetic elements which propagate by a process called “homing”: the endonuclease cleaves a cognate allele from which the mobile element is absent, thereby stimulating a homologous recombination event that duplicates the mobile DNA into the recipient locus. Given their exceptional cleavage properties in terms of efficacy and specificity, they could represent ideal scaffolds to derive novel, highly specific endonucleases.

[0235] HEs belong to four major families. The LAGLIDADG family, named after a conserved peptidic motif involved in the catalytic center, is the most widespread and the best characterized group. Seven structures are now available. Whereas most proteins from this family are monomeric and display two LAGLIDADG motifs, a few have only one motif, and thus dimerize to cleave palindromic or pseudo-palindromic target sequences.

[0236] Although the LAGLIDADG peptide is the only conserved region among members of the family, these proteins share a very similar architecture. The catalytic core is flanked by two DNA-binding domains with a perfect two-fold symmetry for homodimers such as I-CreI (Chevalier, Monnat et al. 2001), I-MsoI (Chevalier, Turmel et al. 2003) and I-CeuI (Spiegel, Chevalier et al. 2006) and with a pseudo symmetry for monomers such as I-SceI (Moure, Gimble et al. 2003), I-DmoI (Silva, Dalgaard et al. 1999) or I-AniI (Bolduc, Spiegel et al. 2003). Both monomers and both domains (for monomeric proteins) contribute to the catalytic core, organized around divalent cations. Just above the catalytic core, the two LAGLIDADG peptides also play an essential role in the dimerization interface. DNA binding depends on two typical saddle-shaped αββαββα folds, sitting on the DNA major groove. Other domains can be found, for example in inteins such as PI-PfuI (Ichiyanagi, Ishino et al. 2000) and PI-SceI (Moure, Gimble et al. 2002), whose protein splicing domain is also involved in DNA binding.

[0237] The making of functional chimeric meganucleases, by fusing the N-terminal I-DmoI domain with an I-CreI monomer (Chevalier, Kortemme et al. 2002; Epinat, Arnould et al. 2003); International PCT Application WO 03/078619 (Cellectis) and WO 2004/031346 (Fred Hutchinson Cancer Research Center, Stoddard et al)) have demonstrated the plasticity of LAGLIDADG proteins.

[0238] Different groups have also used a semi-rational approach to locally alter the specificity of the I-CreI (Seligman, Stephens et al. 1997; Sussman, Chadsey et al. 2004); International PCT Applications WO 2006/097784, WO 2006/097853, WO 2007/060495 and WO 2007/049156 (Cellectis); (Arnould, Chames et al. 2006; Rosen, Morrison et al. 2006; Smith, Grizot et al. 2006), I-SceI (Doyon, Pattanayak et al. 2006), PI-SceI (Gimble, Moure et al. 2003) and I-MsoI (Ashworth, Havranek et al. 2006).

[0239] In addition, hundreds of I-CreI derivatives with locally altered specificity were engineered by combining the semi-rational approach and High Throughput Screening:
[0240] Residues Q44, R68 and R70 or Q44, R68, D75 and 177 of I-CreI were mutagenized and a collection of variants with altered specificity at positions±3 to 5 of the DNA target (5NNN DNA target) were identified by screening (International PCT Applications WO 2006/097784 and WO 2006/097853 (Cellectis); (Arnould, Chames et al. 2006; Smith, Grizot et al. 2006).
[0241] Residues K28, N30 and Q38 or N30, Y33 and Q38 or K28, Y33, Q38 and S40 of I-CreI were mutagenized and a collection of variants with altered specificity at positions ±8 to 10 of the DNA target (10NNN DNA target) were identified by screening (Arnould, Chames et al. 2006; Smith, Grizot et al. 2006); International PCT Applications WO 2007/060495 and WO 2007/049156 (Cellectis)).

[0242] Two different variants were combined and assembled in a functional heterodimeric endonuclease able to cleave a chimeric target resulting from the fusion of two different halves of each variant DNA target sequence ((Arnould, Chames et al. 2006; Smith, Grizot et al. 2006); International PCT Applications WO 2006/097854 and WO 2007/034262).

[0243] Furthermore, residues 28 to 40 and 44 to 77 of I-CreI were shown to form two partially separable functional subdomains, able to bind distinct parts of a homing endonuclease target half-site (Smith, Grizot et al. 2006); International PCT Applications WO 2007/049095 and WO 2007/057781 (Cellectis)).

[0244] The combination of mutations from the two subdomains of I-CreI within the same monomer allowed the design of novel chimeric molecules (homodimers) able to cleave a palindromic combined DNA target sequence comprising the nucleotides at positions ±3 to 5 and ±8 to 10 which are bound by each subdomain ((Smith, Grizot et al. 2006); International PCT Applications WO 2007/049095 and WO 2007/057781 (Cellectis)).

[0245] The method for producing meganuclease variants and the assays based on cleavage-induced recombination in mammal or yeast cells, which are used for screening variants with altered specificity are described in the International PCT Application WO 2004/067736; (Epinat, Arnould et al. 2003; Chames, Epinat et al. 2005; Arnould, Chames et al. 2006). These assays result in a functional LacZ reporter gene which can be monitored by standard methods.

[0246] The combination of the two former steps allows a larger combinatorial approach, involving four different subdomains. The different subdomains can be modified separately and combined to obtain an entirely redesigned meganuclease variant (heterodimer or single-chain molecule) with chosen specificity. In a first step, couples of novel meganucleases are combined in new molecules (“half-meganucleases”) cleaving palindromic targets derived from the target one wants to cleave. Then, the combination of such “half-meganucleases” can result in a heterodimeric species cleaving the target of interest. The assembly of four sets of mutations into heterodimeric endonucleases cleaving a model target sequence or a sequence from different genes has been described in the following Cellectis International patent applications: XPC gene (WO2007/093918), RAG gene (WO2008/010093), HPRT gene (WO2008/059382), beta-2 microglobulin gene (WO2008/102274), Rosa26 gene (WO2008/152523), Human hemoglobin beta gene (WO2009/13622) and Human interleukin-2 receptor gamma chain gene (WO2009019614).

[0247] These variants can be used to cleave genuine chromosomal sequences and have paved the way for novel perspectives in several fields, including gene therapy.

[0248] Examples of such endonuclease include I-Sce I, I-Chu I, I-Cre I, I-Csm I, PI-Sce I, PI-Tli I, PI-Mtu I, I-Ceu I, I-Sce II, I-Sce III, HO, PI-Civ I, PI-Ctr I, PI-Aae I, PI-Bsu I, PI-Dha I, PI-Dra I, PI-May I, PI-Mch I, PI-Mfu PI-MfI I, PI-Mga I, PI-Mgo I, PI-Min I, PI-Mka I, PI-Mle I, PI-Mma I, PI-Msh I, PI-Msm I, PI-Mth I, PI-Mtu I, PI-Mxe I, PI-Npu I, PI-Pfu I, PI-Rma I, PI-Spb I, PI-Ssp I, PI-Fac I, PI-Mja I, PI-Pho I, PI-Tag I, PI-Thy I, PI-Tko I, PI-Tsp I, I-MsoI.

[0249] A homing endonuclease can be a LAGLIDADG endonuclease such as I-SceI, I-CreI, I-CeuI, I-MsoI, and I-DmoI.

[0250] Said LAGLIDADG endonuclease can be I-Sce I, a member of the family that contains two LAGLIDADG motifs and functions as a monomer, its molecular mass being approximately twice the mass of other family members like I-CreI which contains only one LAGLIDADG motif and functions as homodimers.

[0251] Endonucleases mentioned in the present application encompass both wild-type (naturally-occurring) and variant endonucleases. Endonucleases according to the invention can be a “variant” endonuclease, i.e. an endonuclease that does not naturally exist in nature and that is obtained by genetic engineering or by random mutagenesis, i.e. an engineered endonuclease. This variant endonuclease can for example be obtained by substitution of at least one residue in the amino acid sequence of a wild-type, naturally-occurring, endonuclease with a different amino acid. Said substitution(s) can for example be introduced by site-directed mutagenesis and/or by random mutagenesis. In the frame of the present invention, such variant endonucleases remain functional, i.e. they retain the capacity of recognizing (binding function) and optionally specifically cleaving a target sequence to initiate gene targeting process.

[0252] The variant endonuclease according to the invention cleaves a target sequence that is different from the target sequence of the corresponding wild-type endonuclease. Methods for obtaining such variant endonucleases with novel specificities are well-known in the art.

[0253] Endonucleases variants may be homodimers (meganuclease comprising two identical monomers) or heterodimers (meganuclease comprising two non-identical monomers). It is understood that the scope of the present invention also encompasses endonuclease variants per se, including heterodimers (WO2006097854), obligate heterodimers (WO2008093249) and single chain meganucleases (WO03078619 and WO2009095793) as non limiting examples, able to cleave one target of interest in a polynucleotidic sequence or in a genome. The invention also encompasses hybrid variant per se composed of two monomers from different origins (WO03078619).

[0254] Endonucleases with novel specificities can be used in the method according to the present invention for gene targeting and thereby integrating a transgene of interest into a genome at a predetermined location.
[0255] by “parent meganuclease” it is intended to mean a wild type meganuclease or a variant of such a wild type meganuclease with identical properties or alternatively a meganuclease with some altered characteristics in comparison to a wild type version of the same meganuclease. This expression can also be transposed to an endonuclease, a rare-cutting endonuclease, a chimeric rare-cutting endonuclease, a TALEN or a compact TALEN and derivatives.
[0256] By “delivery vector” or “delivery vectors” is intended any delivery vector which can be used in the present invention to put into cell contact (i.e. “contacting”) or deliver inside cells or subcellular compartments agents/chemicals and molecules (proteins or nucleic acids) needed in the present invention. It includes, but is not limited to liposomal delivery vectors, viral delivery vectors, drug delivery vectors, chemical carriers, polymeric carriers, lipoplexes, polyplexes, dendrimers, microbubbles (ultrasound contrast agents), nanoparticles, emulsions or other appropriate transfer vectors. These delivery vectors allow delivery of molecules, chemicals, macromolecules (genes, proteins), or other vectors such as plasmids, peptides developed by Diatos. In these cases, delivery vectors are molecule carriers. By “delivery vector” or “delivery vectors” is also intended delivery methods to perform transfection.
[0257] The terms “vector” or “vectors” refer to a nucleic acid molecule capable of transporting another nucleic acid to which it has been linked. A “vector” in the present invention includes, but is not limited to, a viral vector, a plasmid, a RNA vector or a linear or circular DNA or RNA molecule which may consists of a chromosomal, non chromosomal, semi-synthetic or synthetic nucleic acids. Preferred vectors are those capable of autonomous replication (episomal vector) and/or expression of nucleic acids to which they are linked (expression vectors). Large numbers of suitable vectors are known to those of skill in the art and commercially available.

[0258] Viral vectors include retrovirus, adenovirus, parvovirus (e.g. adenoassociated viruses), coronavirus, negative strand RNA viruses such as orthomyxovirus (e.g., influenza virus), rhabdovirus (e.g., rabies and vesicular stomatitis virus), paramyxovirus (e.g. measles and Sendai), positive strand RNA viruses such as picornavirus and alphavirus, and double-stranded DNA viruses including adenovirus, herpesvirus (e.g., Herpes Simplex virus types 1 and 2, Epstein-Barr virus, cytomegalovirus), and poxvirus (e.g., vaccinia, fowlpox and canarypox). Other viruses include Norwalk virus, togavirus, flavivirus, reoviruses, papovavirus, hepadnavirus, and hepatitis virus, for example. Examples of retroviruses include: avian leukosis-sarcoma, mammalian C-type, B-type viruses, D type viruses, HTLV-BLV group, lentivirus, spumavirus (Coffin, J. M., Retroviridae: The viruses and their replication, In Fundamental Virology, Third Edition, B. N. Fields, et al., Eds., Lippincott-Raven Publishers, Philadelphia, 1996).
[0259] By “lentiviral vector” is meant HIV-Based lentiviral vectors that are very promising for gene delivery because of their relatively large packaging capacity, reduced immunogenicity and their ability to stably transduce with high efficiency a large range of different cell types. Lentiviral vectors are usually generated following transient transfection of three (packaging, envelope and transfer) or more plasmids into producer cells. Like HIV, lentiviral vectors enter the target cell through the interaction of viral surface glycoproteins with receptors on the cell surface. On entry, the viral RNA undergoes reverse transcription, which is mediated by the viral reverse transcriptase complex. The product of reverse transcription is a double-stranded linear viral DNA, which is the substrate for viral integration in the DNA of infected cells.
[0260] By “integrative lentiviral vectors (or LV)”, is meant such vectors as non limiting example, that are able to integrate the genome of a target cell.
[0261] At the opposite by “non integrative lentiviral vectors (or NILV)” is meant efficient gene delivery vectors that do not integrate the genome of a target cell through the action of the virus integrase.

[0262] One type of preferred vector is an episome, i.e., a nucleic acid capable of extra-chromosomal replication. Preferred vectors are those capable of autonomous replication and/or expression of nucleic acids to which they are linked. Vectors capable of directing the expression of genes to which they are operatively linked are referred to herein as “expression vectors. A vector according to the present invention comprises, but is not limited to, a YAC (yeast artificial chromosome), a BAC (bacterial artificial), a baculovirus vector, a phage, a phagemid, a cosmid, a viral vector, a plasmid, a RNA vector or a linear or circular DNA or RNA molecule which may consist of chromosomal, non chromosomal, semi-synthetic or synthetic DNA. In general, expression vectors of utility in recombinant DNA techniques are often in the form of “plasmids” which refer generally to circular double stranded DNA loops which, in their vector form are not bound to the chromosome. Large numbers of suitable vectors are known to those of skill in the art. Vectors can comprise selectable markers, for example: neomycin phosphotransferase, histidinol dehydrogenase, dihydrofolate reductase, hygromycin phosphotransferase, herpes simplex virus thymidine kinase, adenosine deaminase, glutamine synthetase, and hypoxanthine-guanine phosphoribosyl transferase for eukaryotic cell culture; TRP1 for S. cerevisiae; tetracyclin, rifampicin or ampicillin resistance in E. coli. Preferably said vectors are expression vectors, wherein a sequence encoding a polypeptide of interest is placed under control of appropriate transcriptional and translational control elements to permit production or synthesis of said polypeptide. Therefore, said polynucleotide is comprised in an expression cassette. More particularly, the vector comprises a replication origin, a promoter operatively linked to said encoding polynucleotide, a ribosome binding site, a RNA-splicing site (when genomic DNA is used), a polyadenylation site and a transcription termination site. It also can comprise an enhancer or silencer elements. Selection of the promoter will depend upon the cell in which the polypeptide is expressed. Suitable promoters include tissue specific and/or inducible promoters. Examples of inducible promoters are: eukaryotic metallothionine promoter which is induced by increased levels of heavy metals, prokaryotic lacZ promoter which is induced in response to isopropyl-β-D-thiogalacto-pyranoside (IPTG) and eukaryotic heat shock promoter which is induced by increased temperature. Examples of tissue specific promoters are skeletal muscle creatine kinase, prostate-specific antigen (PSA), α-antitrypsin protease, human surfactant (SP) A and B proteins, β-casein and acidic whey protein genes.

[0263] Inducible promoters may be induced by pathogens or stress, more preferably by stress like cold, heat, UV light, or high ionic concentrations (reviewed in Potenza C et al. 2004, In vitro Cell Dev Biol 40:1-22). Inducible promoter may be induced by chemicals (reviewed in (Moore, Samalova et al. 2006); (Padidam 2003); (Wang, Zhou et al. 2003); (Zuo and Chua 2000).

[0264] Delivery vectors and vectors can be associated or combined with any cellular permeabilization techniques such as sonoporation or electroporation or derivatives of these techniques.
[0265] By cell or cells is intended any prokaryotic or eukaryotic living cells, cell lines derived from these organisms for in vitro cultures, primary cells from animal or plant origin.
[0266] By “primary cell” or “primary cells” are intended cells taken directly from living tissue (i.e. biopsy material) and established for growth in vitro, that have undergone very few population doublings and are therefore more representative of the main functional components and characteristics of tissues from which they are derived from, in comparison to continuous tumorigenic or artificially immortalized cell lines. These cells thus represent a more valuable model to the in vivo state they refer to.
[0267] In the frame of the present invention, “eukaryotic cells” refer to a fungal, plant or animal cell or a cell line derived from the organisms listed below and established for in vitro culture. More preferably, the fungus is of the genus Aspergillus, Penicillium, Acremonium, Trichoderma, Chrysoporium, Mortierella, Kluyveromyces or Pichia; More preferably, the fungus is of the species Aspergillus niger, Aspergillus nidulans, Aspergillus oryzae, Aspergillus terreus, Penicillium chrysogenum, Penicillium citrinum, Acremonium Chrysogenum, Trichoderma reesei, Mortierella alpine, Chrysosporium lucknowense, Kluyveromyces lactis, Pichia pastoris or Pichia ciferrii.

[0268] More preferably the plant is of the genus Arabidospis, Nicotiana, Solanum, lactuca, Brassica, Oryza, Asparagus, Pisum, Medicago, Zea, Hordeum, Secale, Triticum, Capsicum, Cucumis, Cucurbita, Citrullis, Citrus, Sorghum; More preferably, the plant is of the species Arabidospis thaliana, Nicotiana tabaccum, Solanum lycopersicum, Solanum tuberosum, Solanum melongena, Solanum esculentum, Lactuca saliva, Brassica napus, Brassica oleracea, Brassica rapa, Oryza glaberrima, Oryza sativa, Asparagus officinalis, Pisum sativum, Medicago sativa, zea mays, Hordeum vulgare, Secale cereal, Triticum aestivum, Triticum durum, Capsicum sativus, Cucurbita pepo, Citrullus lanatus, Cucumis melo, Citrus aurantifolia, Citrus maxima, Citrus medica, Citrus reticulata.

[0269] More preferably the animal cell is of the genus Homo, Rattus, Mus, Sus, Bos, Danio, Canis, Felis, Equus, Salmo, Oncorhynchus, Gallus, Meleagris, Drosophila, Caenorhabditis; more preferably, the animal cell is of the species Homo sapiens, Rattus norvegicus, Mus musculus, Sus scrofa, Bos taurus, Danio rerio, Canis lupus, Felis catus, Equus caballus, Salmo salar, Oncorhynchus mykiss, Gallus gallus, Meleagris gallopavo, Drosophila melanogaster, Caenorhabditis elegans.

[0270] In the present invention, the cell can be a plant cell, a mammalian cell, a fish cell, an insect cell or cell lines derived from these organisms for in vitro cultures or primary cells taken directly from living tissue and established for in vitro culture. As non-limiting examples, cell can be protoplasts obtained from plant organisms listed above. As non limiting examples cell lines can be selected from the group consisting of CHO-K1 cells; HEK293 cells; Caco2 cells; U2-OS cells; NIH 3T3 cells; NSO cells; SP2 cells; CHO-S cells; DG44 cells; K-562 cells, U-937 cells; MRCS cells; IMR90 cells; Jurkat cells; HepG2 cells; HeLa cells; HT-1080 cells; HCT-116 cells; Hu-h7 cells; Huvec cells; Molt 4 cells.

[0271] All these cell lines can be modified by the method of the present invention to provide cell line models to produce, express, quantify, detect, study a gene or a protein of interest; these models can also be used to screen biologically active molecules of interest in research and production and various fields such as chemical, biofuels, therapeutics and agronomy as non-limiting examples. Adoptive immunotherapy using genetically engineered T cells is a promising approach for the treatment of malignancies and infectious diseases. Most current approaches rely on gene transfer by random integration of an appropriate T Cell Receptor (TCR) or Chimeric Antigen Receptor (CAR). Targeted approach using rare-cutting endonucleases is an efficient and safe alternative method to transfer genes into T cells and generate genetically engineered T cells.
[0272] by “homologous” is intended a sequence with enough identity to another one to lead to homologous recombination between sequences, more particularly having at least 95% identity, preferably 97% identity and more preferably 99%.
[0273] identity” refers to sequence identity between two nucleic acid molecules or polypeptides. Identity can be determined by comparing a position in each sequence which may be aligned for purposes of comparison. When a position in the compared sequence is occupied by the same base, then the molecules are identical at that position. A degree of similarity or identity between nucleic acid or amino acid sequences is a function of the number of identical or matching nucleotides at positions shared by the nucleic acid sequences. Various alignment algorithms and/or programs may be used to calculate the identity between two sequences, including FASTA, or BLAST which are available as a part of the GCG sequence analysis package (University of Wisconsin, Madison, Wis.), and can be used with, e.g., default setting.
[0274] by “mutation” is intended the substitution, deletion, insertion of one or more nucleotides/amino acids in a polynucleotide (cDNA, gene) or a polypeptide sequence. Said mutation can affect the coding sequence of a gene or its regulatory sequence. It may also affect the structure of the genomic sequence or the structure/stability of the encoded mRNA.
[0275] In the frame of the present invention, the expression “double-strand break-induced mutagenesis” (DSB-induced mutagenesis) refers to a mutagenesis event consecutive to an NHEJ event following an endonuclease-induced DSB, leading to insertion/deletion at the cleavage site of an endonuclease.
[0276] By “gene” is meant the basic unit of heredity, consisting of a segment of DNA arranged in a linear manner along a chromosome, which codes for a specific protein or segment of protein. A gene typically includes a promoter, a 5′ untranslated region, one or more coding sequences (exons), optionally introns, a 3′ untranslated region. The gene may further comprise a terminator, enhancers and/or silencers.
[0277] As used herein, the term “transgene” refers to a sequence encoding a polypeptide. Preferably, the polypeptide encoded by the transgene is either not expressed, or expressed but not biologically active, in the cell, tissue or individual in which the transgene is inserted. Most preferably, the transgene encodes a therapeutic polypeptide useful for the treatment of an individual.
[0278] The term “gene of interest” or “GOI” refers to any nucleotide sequence encoding a known or putative gene product.
[0279] As used herein, the term “locus” is the specific physical location of a DNA sequence (e.g. of a gene) on a chromosome. The term “locus” usually refers to the specific physical location of an endonuclease's target sequence on a chromosome. Such a locus, which comprises a target sequence that is recognized and cleaved by an endonuclease according to the invention, is referred to as “locus according to the invention”. Also, the expression “genomic locus of interest” is used to qualify a nucleic acid sequence in a genome that can be a putative target for a double-strand break according to the invention. It is understood that the considered genomic locus of interest of the present invention can not only qualify a nucleic acid sequence that exists in the main body of genetic material (i.e. in a chromosome) of a cell but also a portion of genetic material that can exist independently to said main body of genetic material such as plasmids, episomes, virus, transposons or in organelles such as mitochondria or chloroplasts as non-limiting examples.
[0280] By the expression “loss of genetic information” is understood the elimination or addition of at least one given DNA fragment (at least one nucleotide) or sequence, bordering the recognition sites of the endonucleases, chimeric rare-cutting endonucleases, compact TALEN or enhanced compact TALEN of the present invention or the intervening sequence between at least two processing sites of the endonucleases, chimeric rare-cutting endonucleases, compact TALEN or enhanced compact TALEN of the present invention and leading to a change of the original sequence around said endonuclease-cutting sites, chimeric rare-cutting endonuclease-cutting sites, compact TALEN or enhanced compact TALEN recognition DNA binding site within the genomic locus of interest. This loss of genetic information can be, as a non-limiting example, the elimination of an intervening sequence between two endonuclease-cutting sitesor between two processing sites of a compact TALEN or enhanced compact TALEN. As another non-limiting example, this loss of genetic information can also be an excision of a single-strand of DNA spanning the binding region of a compact TALEN or an enhanced compact TALEN according to the present invention
[0281] By “scarless re-ligation” or “scarless religation” is intended the perfect re-ligation event, without loss of genetic information (no insertion/deletion events) of the DNA broken ends through NHEJ process after the creation of a double-strand break event.
[0282] By “Imprecise NHEJ” is intended the re-ligation of nucleic acid ends generated by a DSB, with insertions or deletions of nucleotides. Imprecise NHEJ is an outcome and not a repair pathway and can result from different NHEJ pathways (Ku dependent or Ku independent as non-limiting examples).
[0283] By “fusion protein” is intended the result of a well-known process in the art consisting in the joining of two or more genes which originally encode for separate proteins or part of them, the translation of said “fusion gene” resulting in a single polypeptide with functional properties derived from each of the original proteins.
[0284] By “chimeric rare-cutting endonuclease” is meant any fusion protein comprising a rare-cutting endonuclease. Said rare-cutting endonuclease might be at the N-terminal part of said chimeric rare-cutting endonuclease; at the opposite, said rare-cutting endonuclease might be at the C-terminal part of said chimeric rare-cutting endonuclease. A “chimeric rare-cutting endonuclease” according to the present invention which comprises two catalytic domains can be described as “bi-functional” or as “bi-functional meganuclease”. A “chimeric rare-cutting endonuclease” according to the present invention which comprises more than two catalytic domains can be described as “multi-functional” or as “multi-functional meganuclease”. As non-limiting examples, chimeric rare-cutting endonucleases according to the present invention can be a fusion protein between a rare-cutting endonuclease and one catalytic domain; chimeric rare-cutting endonucleases according to the present invention can also be a fusion protein between a rare-cutting endonuclease and two catalytic domains. As mentioned previously, the rare-cutting endonuclease part of chimeric rare-cutting endonucleases according to the present invention can be a meganuclease comprising two identical monomers, two non-identical monomers, or a single chain meganuclease. The rare-cutting endonuclease part of chimeric rare-cutting endonucleases according to the present invention can also be the DNA-binding domain of an inactive rare-cutting endonuclease. In other non-limiting examples, chimeric rare-cutting endonucleases according to the present invention can be derived from a TALE-nuclease (TALEN), i.e. a fusion between a DNA-binding domain derived from a Transcription Activator Like Effector (TALE) and one or two catalytic domains. In other non-limiting examples, a subclass of chimeric rare-cutting endonucleases according to the present invention can be a “compact TALE-nuclease” (cTALEN), i.e. a fusion between an engineered core TALE scaffold comprising at least a Repeat Variable Dipeptide regions domain and at least one catalytic domain, said fusion protein constituting a compact TALEN active entity that does not require dimerization for DNA processing activity. Said catalytic domain can be an endonuclease as listed in table 2 as non-limiting examples; said catalytic domain can be a frequent-cutting endonuclease such as a restriction enzyme selected from the group consisting of MmeI, R-HinPII, R.MspI, R.MvaI, Nb.BsrDI, BsrDI A, Nt.BspD6I, ss.BspD6I, R.PleI, MlyI and AlwI as non-limiting restriction enzymes examples listed in table 2.
[0285] By “enhancer domain(s)” or “enhancer(s)” are meant protein domains that provide functional and/or structural support to a protein scaffold, a compact TALEN as a non-limiting example, therefore allowing an enhancement in global DNA processing efficiency of the resulting fusion protein, i.e. an enhanced compact TALEN, relative to the DNA processing efficiency of the starting compact TALEN. A particular domain is an enhancer domain when it provides at least a 5% enhancement in efficiency of the starting scaffold, more preferably 10%, again more preferably 15%, again more preferably 20%, again more preferably 25%, again more preferably 50%, again more preferably greater than 50%. Non-limiting examples of such enhancer domains are given in Tables 1 and 2. By “auxiliary enhancer domains” or “auxiliary enhancers” or “auxiliary domains” are meant protein domains acting in trans with a compact TALEN or an enhanced compact TALEN to provide an additional function that is not essential for said basic compact TALEN activity or said enhanced compact TALEN activity. When such auxiliary enhancers are used, compact TALEN or enhanced compact TALEN are converted to “trans TALEN”, respectively trans compact TALEN and trans enhanced compact TALEN.
[0286] By “catalytic domain” is intended the protein domain or module of an enzyme containing the active site of said enzyme; by active site is intended the part of said enzyme at which catalysis of the substrate occurs. Enzymes, but also their catalytic domains, are classified and named according to the reaction they catalyze. The Enzyme Commission number (EC number) is a numerical classification scheme for enzymes, based on the chemical reactions they catalyze (http://www.chem.qmul.ac.ukhubmb/enzyme/). In the scope of the present invention, any catalytic domain can be fused to an engineered core TALE scaffold to generate a compact TALEN active entity with a DNA processing efficiency provided by at least said catalytic domain activity. Said catalytic domain can provide a nuclease activity (endonuclease or exonuclease activities, cleavase or nickase), a polymerase activity, a kinase activity, a phosphatase activity, a methylase activity, a topoisomerase activity, an integrase activity, a transposase activity or a ligase activity as non-limiting examples. Non-limiting examples of such catalytic domains are given in Tables 1 and 2. In a preferred embodiment of the present invention, said catalytic domain can be considered as an enhancer domain. If catalytically active, said enhancer domain can provide functional and/or structural support to the compact TALEN scaffold leading to an enhanced compact TALEN when fused to it. If catalytically inactive, said enhancer domain provides structural support to compact TALEN scaffold leading to an enhanced compact TALEN when fused to it. It can be envisioned from the present invention to fuse catalytic domains according to the present invention to one part of a classical TALEN in order to give these classical TALENs new catalytical properties provided by at least said catalytic domain activity or to improve their DNA processing efficiency.
[0287] By “nuclease catalytic domain” is intended the protein domain comprising the active site of an endonuclease or an exonuclease enzyme. Such nuclease catalytic domain can be, for instance, a “cleavase domain” or a “nickase domain”. By “cleavase domain” is intended a protein domain whose catalytic activity generates a Double Strand Break (DSB) in a DNA target. By “nickase domain” is intended a protein domain whose catalytic activity generates a single strand break in a DNA target sequence. Non-limiting examples of such catalytic domains are given in Tables 1 and 2 with a GenBank or NCBI or UniProtKB/Swiss-Prot number as a reference.
[0288] By a “TALE-nuclease” (TALEN) or a “classical TALEN” is intended a fusion protein consisting of a DNA-binding domain derived from a Transcription Activator Like Effector (TALE) and one FokI catalytic domain, that need to dimerize to form an active entity able to cleave a DNA target sequence.
[0289] By “compact TALE-nuclease” (cTALEN) is intended a general designation according to the present invention for a fusion protein between an engineered core TALE scaffold comprising at least one Repeat Variable Dipeptides domain and at least one catalytic domain, said fusion protein constituting a compact TALEN (or cTALEN) active entity and not requiring dimerization for DNA processing activity. Compact TALENs are designed to alleviate the need for multiple independent protein moieties when targeting a DNA cleavage event. Importantly, the requisite “spacer” region and dual target sites essential for the function of current TALENs are unnecessary. In other words, the compact TALEN according to the present invention is an active entity unit able, by itself, to target only one specific single double-stranded DNA target sequence of interest through one DNA binding domain and to process DNA nearby said single double-stranded DNA target sequence of interest. In addition, since the catalytic domain does not require specific DNA contact, there are no restrictions on regions surrounding the core TALE DNA binding domain. In the scope of the present invention, it can be also envisioned some sequence preference in the catalytic domain. When a cTALEN comprises only one catalytic domain, cTALEN can be qualified as a “basic cTALEN” or “cTALEN”. When a cTALEN further comprises at least one “enhancer domain”, cTALEN can be qualified as an enhanced cTALEN or an “eTALEN”. A cTALEN or an eTALEN that comprise at least one cleavase catalytic domain and one nickase catalytic domain or at least two cleavase catalytic domains can be specifically qualified as a dual-cleavage cTALEN or a “dcTALEN”. A cTALEN or an eTALEN acting with an auxiliary domain in trans is qualified as a trans compact TALEN or a trans enhanced compact TALEN, both being “trans TALEN”.

[0290] The above written description of the invention provides a manner and process of making and using it such that any person skilled in this art is enabled to make and use the same, this enablement being provided in particular for the subject matter of the appended claims, which make up a part of the original description.

[0291] As used above, the phrases “selected from the group consisting of,” “chosen from,” and the like include mixtures of the specified materials.

[0292] Where a numerical limit or range is stated herein, the endpoints are included. Also, all values and subranges within a numerical limit or range are specifically included as if explicitly written out.

[0293] The above description is presented to enable a person skilled in the art to make and use the invention, and is provided in the context of a particular application and its requirements. Various modifications to the preferred embodiments will be readily apparent to those skilled in the art, and the generic principles defined herein may be applied to other embodiments and applications without departing from the spirit and scope of the invention. Thus, this invention is not intended to be limited to the embodiments shown, but is to be accorded the widest scope consistent with the principles and features disclosed herein.

[0294] Having generally described this invention, a further understanding can be obtained by reference to certain specific examples, which are provided herein for purposes of illustration only, and are not intended to be limiting unless otherwise specified.

### EXAMPLES

### Example 1

[0295] The wild-type I-CreI meganuclease (SEQ ID NO: 106) was chosen as the parent scaffold on which to fuse the catalytic domain of I-TevI (SEQ ID NO: 107). Wild-type I-TevI functions as a monomeric cleavase of the GIY-YIG family to generate a staggered double-strand break in its target DNA. Guided by biochemical and structural data, variable length constructs were designed from the N-terminal region of 1-TevI that encompass the entire catalytic domain and deletion-intolerant region of its linker (SEQ ID NO: 109 to SEQ ID NO: 114). In all but one case, fragments were fused to the N-terminus of I-CreI with an intervening 5-residue polypeptide linker (-QGPSG-; SEQ ID NO: 103). The linker-less fusion construct naturally contained residues (-LGPDGRKA-; SEQ ID NO: 104) similar to those in the artificial linker. As I-CreI is a homodimer, all fusion constructs contain three catalytic centers (FIG. 4, where “catalytic domain”=cleavase): the natural I-CreI active site at the interface of the dimer and one I-TevI active site per monomer.

[0296] The activity of each “tri-functional” meganuclease was assessed using our yeast assay previously described in International PCT Applications WO 2004/067736 and in (Epinat, Arnould et al. 2003; Chames, Epinat et al. 2005; Arnould, Chames et al. 2006; Smith, Grizot et al. 2006). All constructs were able to cleave the C1221 target DNA with an activity comparable to that of wild-type I-CreI (Table 4). To validate the activity of the I-TevI catalytic domain independent of the I-CreI catalytic core, D20N point mutants were made to inactivate the I-CreI scaffold [SEQ ID NO: 108, SEQ ID NO: 115 to SEQ ID NO: 120; Chevalier, Sussman et al. 2004)]. Tests in our yeast assays showed no visible activity from the inactivated I-CreI (D20N) mutant protein alone (Table 4). However, cleavage activity could be observed for fusions having the I-TevI catalytic domain (Table 4).

TABLE 4
Activity in Yeast assay for I-TevI/I-CreI fusions. The relative
activity of wild-type and fusion proteins on the two parent protein
targets (C1221 for I-CreI and Tev for I-TevI) is shown. Maximal activity
(++++) is seen with each given protein on its native DNA target.
I-CreI_N20 is an inactive variant of the wild-type I-CreI scaffold.
In all other cases, activity is only detected on the C1221 target
since DNA recognition is driven by the I-CreI scaffold. The “N20”
fusion variants illustrate cleavage activity due to the I-TevI
catalytic domain.

Relative Activity in
Yeast Assay (37° C.)

| Protein Construct | C1221 Target | Tev Target |
|---|---|---|
| I-CreI | ++++ | − |
| I-TevI | − | ++++ |
| I-CreI_N20 | − | − |
| hTevCre_D01 | ++++ | − |
| hTevCre_D02 | ++++ | − |
| hTevCre_D03 | ++++ | − |
| hTevCre_D04 | ++++ | − |
| hTevCre_D05 | ++++ | − |
| hTevCre_D06 | ++++ | − |
| hTevCre_D01_N20 | ++ | − |
| hTevCre_D02_N20 | ++ | − |
| hTevCre_D03_N20 | ++ | − |
| hTevCre_D04_N20 | ++ | − |
| hTevCre_D05_N20 | − | − |
| hTevCre_D06_N20 | − | − |

Relative activity is scaled as:
−, no activity detectable;
+, <25% activity;
++, 25% to <50% activity;
+++, 50% to <75% activity;
++++, 75% to 100% activity.

### Example 2

[0297] Protein-fusion scaffolds were designed based on a truncated form of I-CreI (SEQ ID NO: 106, I-CreI_X: SEQ ID NO: 121) and three different linker polypeptides (NFS1=SEQ ID NO: 98; NFS2=SEQ ID NO: 99; CFS1=SEQ ID NO: 100) fused to either the N- or C-terminus of the protein. Structure models were generated in all cases, with the goal of designing a “baseline” fusion linker that would traverse the I-CreI parent scaffold surface with little to no effect on its DNA binding or cleavage activities. For the two N-terminal fusion scaffolds, the polypeptide spanning residues 2 to 153 of I-CreI was used, with a K82A mutation to allow for linker placement. The C-terminal fusion scaffold contains residues 2 to 155 of wild-type I-CreI. For both fusion scaffold types, the “free” end of the linker (i.e. onto which a polypeptide can be linked) is designed to be proximal to the DNA, as determined from models built using the I-CreI/DNA complex structures as a starting point (PDB id: 1g9z). The two I-CreI N-terminal fusion scaffolds (1-Crel_NFS1=SEQ ID NO: 122 and I-CreI_NFS2=SEQ ID NO: 123) and the single C-terminal fusion scaffold (1-Crel_CFS1=SEQ ID NO: 124) were tested in our yeast assay (see Example 1) and found to have activity similar to that of wild-type I-CreI (Table 5).

TABLE 5
Activity in Yeast assay for ColE7/I-CreI fusions. The relative activity
of wild-type and fusion proteins on theC1221 target is shown.
I-CreI_X represents a truncated version of I-CreI based on the crystal
structure and was used as the foundation for the fusion scaffolds
(I-CreI_NFS1, I-CreI_NFS2 and I-CreI_CFS1). “N20” constructs are
inactive variants of the respective I-CreI-based scaffolds. Activity is
detected in all cases wherein the I-CreI scaffold is active or when DNA
catalysis is provided by the ColE7 domain.

| | Relative Activity in |
|---|---|
| | Yeast Assay (37° C.) |
| Protein Construct | C1221 Target |
| I-CreI | ++++ |
| I-CreI_X | ++++ |
| I-CreI_NFS1 | ++++ |
| I-CreI_NFS2 | ++++ |
| I-CreI_CFS1 | ++++ |
| I-CreI_NFS1_N20 | − |
| I-CreI_NFS2_N20 | − |
| I-CreI_CFS1_N20 | − |
| hColE7Cre_D0101 | ++++ |
| hColE7Cre_D0102 | ++++ |
| hCreColE7_D0101 | ++++ |
| hColE7Cre_D0101_N20 | +++ |
| hColE7Cre_D0102_N20 | +++ |
| hCreColE7_D0101_N20 | ++ |

Relative activity is scaled as:
−, no activity detectable;
+, <25% activity;
++, 25% to <50% activity;
+++, 50% to <75% activity;
++++, 75% to 100% activity.

[0298] Colicin E7 is a non-specific nuclease of the HNH family able to process single- and double-stranded DNA (Hsia, Chak et al. 2004). Guided by biochemical and structural data, the region of ColE7 that encompasses the entire catalytic domain (SEQ ID NO: 140; (Hsia, Chak et al. 2004) was selected. This ColE7 domain was fused to the N-terminus of either I-CreI_NFS1 (SEQ ID NO: 122) or I-CreI_NFS2 (SEQ ID NO: 123) to create hColE7Cre_D0101 (SEQ ID NO: 128) or hColE7Cre_D0102 (SEQ ID NO: 129), respectively. In addition, a C-terminal fusion construct, hCreColE7_D0101 (SEQ ID NO: 130), was generated using I-CreI_CFS1 (SEQ ID NO: 124). As I-CreI is a homodimer, all fusion constructs contain three catalytic centers (FIG. 4, where “catalytic domain”=cleavage): the natural I-CreI active site at the interface of the dimer and one ColE7 active site per monomer.

[0299] The activity of each “tri-functional” meganuclease was assessed using our yeast assay (see Example 1). All constructs were able to cleave the C1221 target DNA with an activity comparable to that of wild-type I-CreI (Table 5).

[0300] To validate the activity of the ColE7 catalytic domain independent of the I-CreI catalytic core, D20N point mutants were made to inactivate the I-CreI scaffold (SEQ ID NO: 125, SEQ ID NO: 126, SEQ ID NO: 127, SEQ ID NO: 131, SEQ ID NO: 132, SEQ ID NO: 133; (Chevalier, Sussman et al. 2004)). Tests in our yeast assays showed no visible activity from the inactivated I-CreI (D20N) mutant proteins alone (Table 5). However, cleavage activity could be observed for fusions having the ColE7 catalytic domain (Table 5).

### Example 3

[0301] Two core TALE scaffolds are generated onto which (a) different sets of RVD domains could be inserted to change DNA binding specificity, and; (b) a selection of catalytic domains could be attached, N- or C-terminal, to effect DNA cleavage (or nicking). The core scaffolds (sT1: SEQ ID NO: 134 and sT2: SEQ ID NO: 135) differ in the N- and C-terminal regions, where sT2 is a truncated variant lacking 152 amino acid residues from the N-terminus (Szurek, Rossier et al. 2002) and the last 220 residues from the C-terminus compared to sT1. In sT1, the C-terminal region is a truncation with respect to wild-type TALE domains, ending at a fortuitously defined restriction site (BamHI) in the DNA coding sequence.

[0302] Using the two core scaffolds, four “baseline” TALE DNA binding proteins (bT1-Avr=SEQ ID NO: 136, bT2-Avr=SEQ ID NO: 137, bT1-Pth ═SEQ ID NO 138 and bT2-Pth ═SEQ ID NO 139) are generated by insertion of the corresponding set of repeat domains that recognize the naturally occurring asymmetric sequences AvrBs3 (19 bp) and PthXo1 (25 bp) (FIG. 3). Example protein sequences of the baseline scaffolds are listed in SEQ ID NO: 136 to SEQ ID NO: 139. As is, these scaffolds can be tested in vitro for DNA binding ability on targets having only a single recognition sequence. For comparison with existing TALENs, the catalytic domain of the FokI nuclease (SEQ ID NO: 368 and particularly residues P381 to F583 as non-limiting example) can be fused to either the N- or C-terminus of the baseline scaffolds. Effective cleavage using these controls requires target site DNAs that contain two TALE binding sequences.

[0303] In addition to verifying activity using naturally occurring sequences, five artificial RVD constructs recognizing relevant sequences were generated (FIG. 3): RagT2-R, NptIIT5-L, NptIIT5-R, NptIIT6-L, NptIIT6-R. Example protein sequences of the insert RVDs are listed in SEQ ID NO: 253 to SEQ ID NO: 257. Artificial RVD sequences are used as noted above within the sT1 or sT2 scaffold to generate the desired targeted compact TALENs.

[0304] Basic compact TALENs (cTALENs) are generated via fusion of catalytic domains to either the N- or C-terminus of the baseline scaffolds (FIG. 5, A or B, respectively). A non-exhaustive list of catalytic domains amenable to fusion with TALE DNA binding domains is presented in Table 2. A non-exhaustive list of linkers that can be used is presented in Table 3. It is notable that linker design can depend on the nature of the catalytic domain attached and its given application. It can also be anticipated that specially engineered linkers can be constructed to better control or regulate the activity of either or both domains. Examples 5, 6 and 7 below discuss additional and alternative methods in which linkers can be defined. All cTALEN designs are assessed using our yeast assay (see Example 1) and provide detectable activity comparable to existing engineered meganucleases.

### Example 3a

### TALE::TevI Compact TALEN

[0305] The catalytic domain of I-TevI (SEQ ID NO: 20), a member of the GIY-YIG endonuclease family, was fused to a TALE-derived scaffold (composed of a N-terminal domain, a central core composed of RVDs and a C-terminal domain) to create a new class of cTALEN (TALE::TevI). To distinguish the orientation (N-terminal vs. C-terminal) of the catalytic domain (CD) fusions, construct names are written as either CD::TALE-RVD (catalytic domain is fused N-terminal to the TALE domain) or TALE-RVD::CD (catalytic domain is fused C-terminal to the TALE domain), where “-RVD” optionally designates the sequence recognized by the TALE domain and “CD” is the catalytic domain type. Herein, we describe novel TALE::TevI constructions that target AvrBs3 sequence for example, thus named TALE-AvrBs3::TevI.

[0306] Activity of TALE::TevI in Yeast

[0307] A core TALE scaffold, sT2 (SEQ ID NO: 135), was selected onto which (a) different sets of RVD domains could be inserted to change DNA binding specificity, and; (b) a selection of I-TevI-derived catalytic domains could be attached, N- or C-terminal, to effect DNA cleavage (or nicking). The previously mentioned sT2 truncated scaffold was generated by the PCR from a full-length core TALEN scaffold template (pCLS7183, SEQ ID NO: 141) using primers CMP_G061 (SEQ ID NO: 142) and CMP_G065 (SEQ ID NO: 143) and was cloned into vector pCLS7865 (SEQ ID NO: 144) to generate pCLS7865-cTAL11_CFS1 (pCLS9009, SEQ ID NO: 145), where CFS1 designates the amino acid sequence -GSSG- (with underlying restriction sites BamHI and Kpn21 in the coding DNA to facilitate cloning). Three variants of the I-TevI (SEQ ID NO: 20) catalytic domain were amplified by the PCR on templates TevCreD01 [SEQ ID NO: 109 protein in plasmid pCLS6614 (SEQ ID NO: 146)] using the primer pair CMP_G069 (SEQ ID NO: 147) and CMP_G070 (SEQ ID NO: 148), TevCreD02 [SEQ ID NO: 110 protein in plasmid pCLS6615 (SEQ ID NO: 203)] using the primer pair CMP_G069 (SEQ ID NO: 147) and CMP_G071 (SEQ ID NO: 149) or TevCreD05 [SEQ ID NO: 113 protein in plasmid pCLS6618 (SEQ ID NO: 258)] using the primer pair CMP_G069 (SEQ ID NO: 147) and CMP_G115 (SEQ ID NO: 259) and subcloned into the pCLS9009 backbone by restriction and ligation using BamHI and EagI restriction sites, yielding pCLS7865-cT11_TevD01 (pCLS9010, SEQ ID NO: 150), pCLS7865-cT11_TevD02 (pCLS9011, SEQ ID NO: 151) and pCLS7865-cT11_TevD05 (pCLS15775, SEQ ID NO: 260), respectively. All fusions contain the dipeptide -GS- linking the TALE-derived DNA binding domain and I-TevI-derived catalytic domain.

[0308] The DNA sequence coding for the RVDs to target the AvrBs3 site (SEQ ID NO: 152) was subcloned into both plasmids pCLS9010 (SEQ ID NO: 150, encoding the protein of SEQ ID NO: 420), pCLS9011 (SEQ ID NO: 151, encoding the protein of SEQ ID NO: 421) and pCLS15775 (SEQ ID NO: 260, encoding the protein of SEQ ID NO: 422) using Type IIS restriction enzymes BsmBI for the receiving plasmid and BbvI and SfaNI for the inserted RVD sequence to create the subsequent TALE-AvrBs3::TevI constructs cT11AvrTevD01 (pCLS9012, SEQ ID NO: 218, encoding the protein of SEQ ID NO: 423), cT11Avr_TevD02 (pCLS9013, SEQ ID NO: 153, encoding the protein of SEQ ID NO: 424) and cT11Avr_TevD05 (pCLS15776, SEQ ID NO: 261, encoding the protein of SEQ ID NO: 425), respectively. These TALE-AvrBs3::TevI constructs were sequenced and the insert transferred to additional vectors as needed (see below).

[0309] The final TALE-AvrBs3::TevI yeast expression plasmids, pCLS8523 (SEQ ID NO: 154), pCLS8524 (SEQ ID NO: 155) and pCLS12092 (SEQ ID NO: 262), were prepared by yeast in vivo cloning using plasmids pCLS9012, pCLS9013 and pCLS15776, respectively. To generate an intact coding sequence by in vivo homologous recombination, approximately 40 ng of each plasmid linearized by digestion with BssHII and 1 ng of the pCLS0542 (SEQ ID NO: 156) plasmid DNA linearized by digestion with NcoI and EagI were used to transform, respectively, the yeast S. cerevisiae strain FYC2-6A (MATα, trp1Δ63, leu2Δ1, his3Δ200) using a high efficiency LiAc transformation protocol (Arnould et al. 2007).

[0310] All the yeast target reporter plasmids containing the TALEN DNA target sequences were constructed as previously described (International PCT Applications WO 2004/067736 and in Epinat, Arnould et al. 2003; Chames, Epinat et al. 2005; Arnould, Chames et al. 2006; Smith, Grizot et al. 2006).

[0311] The TALE-AvrBs3::TevI constructs were tested in a yeast SSA assay as previously described (International PCT Applications WO 2004/067736 and in Epinat, Arnould et al. 2003; Chames, Epinat et al. 2005; Arnould, Chames et al. 2006; Smith, Grizot et al. 2006) on pseudo palindromic targets in order to compare activity with a standard TALE-AvrBs3::FokI TALEN (pCLS8590, SEQ ID NO: 244), which requires two binding sites for activity. AvrBs3 targets contain two identical recognition sequences juxtaposed with the 3′ ends proximal and separated by “spacer” DNA ranging from 5 to 40 bps (SEQ ID NO: 157 to 192, Table 6). TALE-AvrBs3::TevI activity levels on their respective targets in yeast cells are shown on FIG. 9. Data summarized in FIG. 9 show that TALE-AvrBs3::TevI is active against several targets in Yeast.

[0312] Activity of TALE::TevI in Mammalian Cells

[0313] DNA encoding the TALE-AvrBs3::TevI construct from either pCLS9012 (SEQ ID NO: 218) or pCLS9013 (SEQ ID NO: 153) was subcloned into the pCLS1853 (SEQ ID NO: 193) mammalian expression plasmid using Ascl and XhoI restriction enzymes for the receiving plasmid and BssHII and XhoI restriction enzymes for the TALE-AvrBs3::TevI insert, leading to the mammalian expression plasmids pCLS8993 and pCLS8994 (SEQ ID NO: 194 and 195), respectively.

[0314] All mammalian target reporter plasmids containing the TALEN DNA target sequences were constructed using the standard Gateway protocol (INVITROGEN) into a CHO reporter vector (Arnould, Chames et al. 2006, Grizot, Epinat et al. 2010). The TALE-AvrBs3::TevI constructs were tested in an extrachromosomal assay in mammalian cells (CHO K1) on pseudo palindromic targets in order to compare activity with a standard TALE-AvrBs3::FokI TALEN, which requires two binding sites for activity. AvrBs3 targets contain two identical recognition sequences juxtaposed with the 3′ ends proximal and separated by “spacer” DNA ranging from 5 to 40 bps (SEQ ID NO: 157 to 192, Table 6).

[0315] For this assay, CHO K1 cells were transfected in a 96-well plate format with 75 ng of target vector and an increasing quantity of each variant DNA from 0.7 to 25 ng, in the presence of PolyFect reagent NIL per well). The total amount of transfected DNA was completed to 125 ng (target DNA, variant DNA, carrier DNA) using an empty vector. Seventy-two hours after transfection, culture medium was removed and 150 μl of lysis/revelation buffer for β-galactosidase liquid assay was added. After incubation at 37° C., optical density was measured at 420 nm. The entire process is performed on an automated Velocityll BioCel platform (Grizot, Epinat et al. 2009).

[0316] Activity levels in mammalian cells for the TALE-AvrBs3::TevI constructs (12.5 ng DNA transfected) on the Avr15 target (SEQ ID NO: 167) are shown in FIG. 10. TALE-AvrBs3::TevI appears to be efficient to cleave the target sequence.

[0317] TALE::TevI Nickase Activity

[0318] The results described in examples above illustrate two TALE::TevI fusions, each containing one TALE-based DNA binding domain and one I-TevI-based catalytic domain, working to generate detectable activity. The assays used measure tandem repeat recombination by single-strand annealing, a process that is triggered essentially by a DSB (Sugawara and Haber 1992; Paques and Duchateau 2007). TALE::TevI fusions can have a nickase activity insufficient to alone trigger a signal in the cell-based assay. However, two TALE::TevI proteins binding on two nearby sites can sometimes generate two independent nicks, that when proximal and on different DNA strands can create a DSB. In this case, each TALE::TevI is a cTALEN able to generate a nick.

[0319] Different experiments are set up to measure TALE::TevI nickase activity:

[0320] Super-Coiled Circular Plasmid Nicking and/or Linearization Assay

[0321] The sequences encoding the TALE-AvrBs3::TevI constructs cT11Avr_TevD01 and cT11Avr_TevD02 are cloned into a T7-based expression vector using NcoI/EagI restriction sites to yield plasmids pCLS9021 (SEQ ID NO: 201) and pCLS9022 (SEQ ID NO: 202), respectively. This cloning step results in TALE-AvrBs3::TevI proteins having an additional hexa-His tag for purification. Plasmids pCLS9021 and pCLS9022 are then used to produce active proteins by one of two methods:
[0322] 1. Plasmids are used in a standard in vitro transcription/translation system; lysates from the translation are used directly without further purification.
[0323] 2. Plasmids are used to transform E. coli BL21(DE3) cells for expression using standard protocols, namely: growth to log phase, induction with IPTG, harvest, cell lysis and purification via affinity methods for His-tagged proteins.
   Active proteins are assayed against DNA targets having either none, one or two AvrBs3 recognition site sequences. When more than one site is present, identical recognition sequences are juxtaposed with the 3′ ends proximal and separated by “spacer” DNA ranging from 5 to 40 bps.

[0324] A super-coiled circular plasmid nicking and/or linearization assay is performed. Plasmids harboring the DNA targets described above are prepared by standard methods and column purified to yield super-coiled plasmid of >98% purity. Increasing amounts of TALE-AvrBs3::TevI proteins (prepared as described above) are incubated with each plasmid under conditions to promote DNA cleavage for 1 h at 37° C. Reaction products are separated on agarose gels and visualized by EtBr staining.

[0325] Linear DNA Nicking and/or Cleavage Assay

[0326] A linear DNA nicking and/or cleavage assay is also performed. PCR products containing the target sequences described above are prepared by standard methods and column purified to yield linear substrate of >98% purity. Increasing amounts of TALE-AvrBs3::TevI proteins (prepared as described above) are then incubated with each PCR substrate under conditions to promote DNA cleavage for 1 h at 37° C. Reaction products are separated on a denaturing acrylamide gel and the single-strand DNA visualized.

[0327] Engineering of the TALE::TevI

[0328] Variants differing by truncations of the C-terminal domain of the AvrBs3-derived TALEN (SEQ ID NO: 196) are chosen as starting scaffolds. A subset of these variants includes truncation after positions E886 (C0), P897 (C11), G914 (C28), L926 (C40), D950 (C64), R1000 (C115), D1059 (C172) (the protein domains of truncated C-terminal domains C11 to C172 are respectively given in SEQ ID NO: 204 to 209) and P1117 [also referred as Cter wt or WT Cter (SEQ ID NO: 210) lacking the activation domain of the C-terminal domain of natural AvrBs3 (SEQ ID NO: 220)]. The plasmids coding for the variant scaffolds containing the AvrBs3-derived N-terminal domain, the AvrBs3-derived set of repeat domains and the truncated AvrBs3-derived C-terminal domain [pCLS7821, pCLS7803, pCLS7807, pCLS7809, pCLS7811, pCLS7813, pCLS7817 (SEQ ID NO: 211 to 217) which are based on the pCLS7184 (SEQ ID NO: 196)] allow cloning of any catalytic domain in fusion to the C-terminal domain, using the restriction sites BamHI and EagI.

[0329] Variants of the catalytic domain of I-TevI (SEQ ID NO: 20) are designed from the N-terminal region of I-TevI. A subset of these variants includes truncations of the catalytic domain, as the deletion-intolerant region of its linker, the deletion-tolerant region of its linker and its zinc finger (SEQ ID NO: 197 to 200) named in Liu et al, 2008 (Liu, Dansereau et al. 2008).

[0330] The DNA corresponding to these variants of I-TevI is amplified by the PCR to introduce, at the DNA level, a BamHI (at the 5′ of the coding strand) and a EagI (at the 3′ of the coding strand) restriction site and, at the protein level, a linker (for example -SGGSGS- stretch, SEQ ID NO: 219) between the C terminal domain of the TALE and the variant of the catalytic domain of I-TevI. The final TALE::TevI constructs are generated by insertion of the variant of I-TevI catalytic domains into the scaffold variants using BamHI and EagI and standard molecular biology procedures.

[0331] All the yeast target reporter plasmids containing the TALEN DNA target sequences were constructed as previously described (International PCT Applications WO 2004/067736 and in Epinat, Arnould et al. 2003; Chames, Epinat et al. 2005; Arnould, Chames et al. 2006; Smith, Grizot et al. 2006).

[0332] The TALE-AvrBs3::TevI constructs were tested in a yeast SSA assay as previously described (International PCT Applications WO 2004/067736 and in Epinat, Arnould et al. 2003; Chames, Epinat et al. 2005; Arnould, Chames et al. 2006; Smith, Grizot et al. 2006) on pseudo palindromic targets in order to compare activity with a standard TALE-AvrBs3::FokI TALEN (pCLS8590, SEQ ID NO: 244), which requires two binding sites for activity. AvrBs3 targets contain two identical recognition sequences juxtaposed with the 3′ ends proximal and separated by “spacer” DNA ranging from 5 to 40 bps (SEQ ID NO: 157 to 192, Table 6).

### Example 3b

### TevI::TALE Compact TALEN

[0333] The sT2 (SEQ ID NO: 135) core TALE scaffold described in example 3a was selected to generate pCLS7865-cTAL11_NFS1 (pCLS9008, SEQ ID NO: 234), where NFS1 designates the amino acid sequence -GSSG- (with underlying restriction sites BamHI and Kpn21 in the coding DNA to facilitate cloning). Four variants of the I-TevI (SEQ ID NO: 20) catalytic domain were amplified by the PCR on templates TevCreD01 [SEQ ID NO: 109 protein in plasmid pCLS6614 (SEQ ID NO: 146)] using the primer pairs CMP_G001 (SEQ ID NO: 239) and CMP_G067 (SEQ ID NO: 263) or CMP_G152 (SEQ ID NO: 264), TevCreD02 [SEQ ID NO: 110 protein in plasmid pCLS6615 (SEQ ID NO: 203)] using the primer pair CMP_G001 (SEQ ID NO: 239) and CMP_G068 (SEQ ID NO: 240) or TevCreD05 [SEQ ID NO: 113 protein in plasmid pCLS6618 (SEQ ID NO: 258)] using the primer pair CMP_G001 (SEQ ID NO: 239) and CMP_G114 (SEQ ID NO: 265) and subcloned into the pCLS9008 backbone by restriction and ligation using NcoI and Kpn2I restriction sites, yielding pCLS7865-TevW01_cT11 (pCLS15777, SEQ ID NO: 266, encoding the protein of SEQ ID NO: 426), pCLS7865-TevD01_cT11 (pCLS15778, SEQ ID NO: 267, encoding the protein of SEQ ID NO: 427), pCLS7865-TevD02_cT11 (pCLS12730, SEQ ID NO: 235, encoding the protein of SEQ ID NO: 428) and pCLS7865-TevD05_cT11 (pCLS15779, SEQ ID NO: 268, encoding the protein of SEQ ID NO: 429), respectively. Whereas the TevW01_cT11-based fusion contains the dipeptide -SG- linking the TALE-derived DNA binding domain and I-TevI-derived catalytic domain, all others constructs incorporate a longer pentapeptide -QGPSG- to link the domains.

[0334] Activity of TevI::TALE in Yeast

[0335] The DNA sequence coding for the RVDs to target the AvrBs3 site (SEQ ID NO: 152) was subcloned into plasmids pCLS15777 (SEQ ID NO: 266), pCLS15778 (SEQ ID NO: 267) and pCLS12730 (SEQ ID NO: 235) using Type IIS restriction enzymes BsmBI for the receiving plasmid and BbvI and SfaNI for the inserted RVD sequence to create the subsequent TevI::TALE-AvrBs3 constructs TevW01_cT11Avr (pCLS15780, SEQ ID NO: 269, encoding the protein of SEQ ID NO: 430), TevD01_cT11Avr (pCLS15781, SEQ ID NO: 270, encoding the protein of SEQ ID NO: 431) and TevD02_cT11Avr (pCLS12731, SEQ ID NO: 236, encoding the protein of SEQ ID NO: 432), respectively. A similar cloning technique was used to introduce the RVDs to target the RagT2-R site (SEQ ID NO: 271) into plasmid pCLS15779 (SEQ ID NO: 268) to create the subsequent construct TevD05_cT11RagT2-R (pCLS15782, SEQ ID NO: 272). All TevI::TALE constructs were sequenced and the inserts transferred to additional vectors as needed (see below).

[0336] The final TevI::TALE-based yeast expression plasmids, pCLS11979 (SEQ ID NO: 273), pCLS8521 (SEQ ID NO: 274), pCLS8522 (SEQ ID NO: 237) and pCLS12100 (SEQ ID NO: 275), were prepared by yeast in vivo cloning using plasmid pCLS15780 (SEQ ID NO: 269), pCLS15781 (SEQ ID NO: 270), pCLS12731 (SEQ ID NO: 236) and pCLS15782 (SEQ ID NO: 272), respectively. To generate an intact coding sequence by in vivo homologous recombination, approximately 40 ng of each plasmid linearized by digestion with BssHII and 1 ng of the pCLS0542 (SEQ ID NO: 156) plasmid DNA linearized by digestion with NcoI and EagI were used to transform, respectively, the yeast S. cerevisiae strain FYC2-6A (MATα, trp1Δ63, leu2Δ1, his3Δ200) using a high efficiency LiAc transformation protocol (Arnould et al. 2007).

[0337] All the yeast target reporter plasmids containing the TALEN DNA target sequences were constructed as previously described (International PCT Applications WO 2004/067736 and in Epinat, Arnould et al. 2003; Chames, Epinat et al. 2005; Arnould, Chames et al. 2006; Smith, Grizot et al. 2006).

[0338] The TevI::TALE-AvrBs3 and TevI::TALE-RagT2-R constructs were tested in a yeast SSA assay as previously described (International PCT Applications WO 2004/067736 and in Epinat, Arnould et al. 2003; Chames, Epinat et al. 2005; Arnould, Chames et al. 2006; Smith, Grizot et al. 2006) on pseudo palindromic targets in order to compare activity with a standard TALE-AvrBs3::FokI TALEN (pCLS8590, SEQ ID NO: 244), which requires two binding sites for activity. AvrBs3 targets contain two identical recognition sequences juxtaposed with the 3′ ends proximal and separated by “spacer” DNA ranging from 5 to 40 bps (SEQ ID NO: 157 to 192, Table 6). In addition, constructs were tested on a target having only a single AvrBs3 or RagT2-R recognition site (SEQ ID NO: 238, Table 8). The TevI::TALE-AvrBs3 activity level in yeast was comparable to that of TALE-AvrBs3::TevI (pCLS8524, SEQ ID NO: 155) on suitable targets. Significant activity is illustrated in table 8 for a sample single-site target, according to the cTALEN of the present invention.

TABLE 8
Activity of TevI::TALE-AvrBs3 and and TevI::TALE-
RagT2-R on dual- and single-site DNA targets.

| | TALEN Construct | | |
|---|---|---|---|
| | TevI:: | TevI:: | TALE- |
| | TALE- | TALE- | AvrBs3:: |
| Target DNA | AvrBs3 | RagT2-R | FokI |
| Avr25 (dual-site) | ++++ | n.d. | ++++ |
| (SEQ ID NO: 177) | | | |
| Avr25RAGT2R | ++ | ++ | n.d. |
| (single-site) | | | |
| (SEQ ID NO: 238) | | | |

Relative activity is scaled as:
n.d., no activity detectable;
+, <25% activity;
++, 25% to <50% activity;
+++, 50% to <75% activity;
++++, 75% to 100% activity.

[0339] Activity of TevI::TALE in Plants

[0340] The DNA sequence coding for the RVDs to target the NptIIT5-L and NptIIT6-L sites (SEQ ID NO: 276 to 279) were subcloned into plasmid pCLS12730 (SEQ ID NO: 235) using Type IIS restriction enzymes BsmBI for the receiving plasmid and BbvI and SfaNI for the inserted RVD sequences to create the subsequent TevI::TALE constructs TevD02_cT11NptIIT5-L (pCLS15783, SEQ ID NO: 280) and TevD02_cT11NptIIT6-L (pCLS15784, SEQ ID NO: 281), respectively. The constructs were sequenced and the TevI::TALE inserts transferred by standard cloning techniques to plasmid pCLS14529 (SEQ ID NO: 282) to generate the final TevI::TALE-NptIIT5-L and TevI::TALE-NptIIT6-L expression plasmids, pCLS14579 (SEQ ID NO: 283) and pCLS14581 (SEQ ID NO: 284), respectively. Plasmid pCLS14529 allows for cloning gene of interest sequences downstream of a promoter that confers high levels of constitutive expression in plant cells.

[0341] To test activity in plant cells, a YFP-based single-strand annealing (SSA) assay was employed. The YFP reporter gene has a short duplication of coding sequence that is interrupted by either an NptIIT5 or NptIIT6 TALEN target site. Cleavage at the target site stimulates recombination between the repeats, resulting in reconstitution of a functional YFP gene. To quantify cleavage, the reporter is introduced along with a construct encoding a FokI-based TALEN or compact TALEN into tobacco protoplasts by PEG-mediated transformation (as known or derived from the state of the art). Uniform transformation efficiencies were obtained by using the same amount of plasmid in each transformation—i.e. 15 μg each of plasmids encoding YFP and either the TALEN or cTALEN. After 24 hours, the protoplasts were subjected to flow cytometry to quantify the number of YFP positive cells. The TevI::TALE activity levels, using cTALENs according to the present invention, in plants were comparable to those of a FokI-based TALEN control constructs on the targets tested (Table 9).

TABLE 9
Activity of TevI::TALE-NptIIT5-L and TevI::TALE-
NptIIT6-L on appropriate DNA targets.

TALEN Construct

| | TevI:: | | TevI:: | |
|---|---|---|---|---|
| Target | TALE- | NptII5.1 | TALE- | NptII6.1 |
| DNA | NptIIT5-L | control | NptIIT6-L | control |
| NptII5.1 | +++ | + | n.a. | n.a. |
| NptII6.1 | n.a. | n.a. | + | + |

Relative activity is scaled to the control constructs as:
n.a., not applicable;
+, 100% activity of control (2% YFP positive cells).

### Example 3c

### TALE::NucA Compact TALEN

[0342] NucA (SEQ ID NO: 26), a nonspecific endonuclease from Anabaena sp., was fused to a TALE-derived scaffold (composed of a N-terminal domain, a central core composed of RVDs and a C-terminal domain) to create a new class of cTALEN (TALE::NucA). To distinguish the orientation (N-terminal vs. C-terminal) of the catalytic domain (CD) fusions, construct names are written as either CD::TALE-RVD (catalytic domain is fused N-terminal to the TALE domain) or TALE-RVD::CD (catalytic domain is fused C-terminal to the TALE domain), where “-RVD” optionally designates the sequence recognized by the TALE domain and “CD” is the catalytic domain type. Herein, we describe novel TALE::NucA constructions that target for example the AvrBs3 sequence, and are thus named TALE-AvrBs3::NucA. Notably, the wild-type NucA endonuclease can be inhibited by complex formation with the NuiA protein (SEQ ID NO: 229). In a compact TALEN context, the NuiA protein can function as an auxiliary domain to modulate the nuclease activity of TALE::NucA constructs.

[0343] Activity of TALE::NucA in Yeast

[0344] A core TALE scaffold, sT2 (SEQ ID NO: 135), was selected onto which (a) different sets of RVD domains could be inserted to change DNA binding specificity, and; (b) a selection of NucA-derived catalytic domains could be attached, N- or C-terminal, to effect DNA cleavage (or nicking). As previously mentioned, the sT2 truncated scaffold was generated by the PCR from a full-length core TALEN scaffold template (pCLS7183, SEQ ID NO: 141) using primers CMP_G061 (SEQ ID NO: 142) and CMP_G065 (SEQ ID NO: 143) and was cloned into vector pCLS7865 (SEQ ID NO: 144) to generate pCLS7865-cTAL11_CFS1 (pCLS9009, SEQ ID NO: 145), where CFS1 designates the amino acid sequence -GSSG- (with underlying restriction sites BamHI and Kpn2I in the coding DNA to facilitate cloning). The NucA (SEQ ID NO: 26) catalytic domain, corresponding to amino acid residues 25 to 274, was subcloned into the pCLS9009 backbone (SEQ ID NO: 145) by restriction and ligation using BamHI and EagI restriction sites, yielding pCLS7865-cT11_NucA (pCLS9937, SEQ ID NO: 221, encoding the protein of SEQ ID NO: 433). The fusion contains the dipeptide -GS- linking the TALE-derived DNA binding domain and NucA-derived catalytic domain. The cloning step also brings at the amino acid level an AAD sequence at the Cter of the NucA catalytic domain.

[0345] The DNA sequence coding for the RVDs to target the AvrBs3 site (SEQ ID NO: 152) was subcloned into plasmid pCLS9937 (SEQ ID NO: 221) using Type IIS restriction enzymes BsmBI for the receiving plasmid and BbvI and SfaNI for the inserted RVD sequence to create the subsequent TALE-AvrBs3::NucA construct cT11Avr_NucA (pCLS9938, SEQ ID NO: 222, encoding the protein of SEQ ID NO: 434). The TALE-AvrBs3::NucA construct was sequenced and the insert transferred to additional vectors as needed (see below).

[0346] The final TALE-AvrBs3::NucA yeast expression plasmid, pCLS9924 (SEQ ID NO: 223), was prepared by yeast in vivo cloning using plasmid pCLS9938 (SEQ ID NO: 222). To generate an intact coding sequence by in vivo homologous recombination, approximately 40 ng of plasmid (pCLS9938) linearized by digestion with BssHII and 1 ng of the pCLS0542 (SEQ ID NO: 156) plasmid DNA linearized by digestion with NcoI and EagI were used to transform the yeast S. cerevisiae strain FYC2-6A (MATα, trp1Δ63, leu2Δ1, his3Δ200) using a high efficiency LiAc transformation protocol (Arnould et al. 2007).

[0347] All the yeast target reporter plasmids containing the TALEN DNA target sequences were constructed as previously described (International PCT Applications WO 2004/067736 and in Epinat, Arnould et al. 2003; Chames, Epinat et al. 2005; Arnould, Chames et al. 2006; Smith, Grizot et al. 2006).

[0348] The TALE-AvrBs3::NucA construct was tested in a yeast SSA assay as previously described (International PCT Applications WO 2004/067736 and in Epinat, Arnould et al. 2003; Chames, Epinat et al. 2005; Arnould, Chames et al. 2006; Smith, Grizot et al. 2006) on pseudo palindromic targets in order to compare activity with a standard TALE-AvrBs3::FokI TALEN (pCLS8590, SEQ ID NO: 244), which requires two binding sites for activity. AvrBs3 targets contain two identical recognition sequences juxtaposed with the 3′ ends proximal and separated by “spacer” DNA ranging from 5 to 40 bps (SEQ ID NO: 157 to 192, Table 7). In addition, constructs were tested on a target having only a single AvrBs3 recognition site (SEQ ID NO: 224; Table 7).

[0349] Engineering of the TALE::NucA

[0350] Variants differing by truncations of the C-terminal domain of the AvrBs3-derived TALEN (SEQ ID NO: 196) are chosen as starting scaffolds. A subset of these variants includes truncation after positions E886 (C0), P897 (C11), G914 (C28), L926 (C40), D950 (C64), R1000 (C115), D1059 (C172) (the protein domains of truncated C-terminal domains C11 to C172 are respectively given in SEQ ID NO: 204 to 209) and P1117 [also referred as Cter wt or WT Cter (SEQ ID NO: 210) lacking the activation domain of the C-terminal domain of natural AvrBs3 (SEQ ID NO: 220)]. The plasmids coding for the variant scaffolds containing the AvrBs3-derived N-terminal domain, the AvrBs3-derived set of repeat domains and the truncated AvrBs3-derived C-terminal domain [pCLS7821, pCLS7803, pCLS7807, pCLS7809, pCLS7811, pCLS7813, pCLS7817 (SEQ ID NO: 211 to 217) which are based on the pCLS7184 (SEQ ID NO: 196)] allow cloning of any catalytic domain in fusion to the C-terminal domain, using the restriction sites BamHI and EagI.

[0351] The DNA corresponding to amino acid residues 25 to 274 of NucA is amplified by the PCR to introduce, at the DNA level, a BamHI (at the 5′ of the coding strand) and a EagI (at the 3′ of the coding strand) restriction site and, at the protein level, a linker (for example -SGGSGS- stretch, SEQ ID NO: 219) between the C terminal domain of the TALE and the NucA catalytic domain. The final TALE::NucA constructs are generated by insertion of the NucA catalytic domain into the scaffold variants using BamHI and EagI and standard molecular biology procedures. For example, scaffold variants truncated after positions P897 (C11), G914 (C28) and D950 (C64), respectively encoded by pCLS7803, pCLS7807, pCLS7811, (SEQ ID NO: 212, 213 and 215), were fused to the NucA catalytic domain (SEQ ID NO: 26), leading to pCLS9596, pCLS9597, and pCLS9599 (SEQ ID NO: 225 to 227). The cloning step also brings at the amino acid level an AAD sequence at the Cter of the NucA catalytic domain.

[0352] All the yeast target reporter plasmids containing the TALEN DNA target sequences were constructed as previously described (International PCT Applications WO 2004/067736 and in Epinat, Arnould et al. 2003; Chames, Epinat et al. 2005; Arnould, Chames et al. 2006; Smith, Grizot et al. 2006).

[0353] The TALE-AvrBs3::NucA constructs were tested in a yeast SSA assay as previously described (International PCT Applications WO 2004/067736 and in Epinat, Arnould et al. 2003; Chames, Epinat et al. 2005; Arnould, Chames et al. 2006; Smith, Grizot et al. 2006) on pseudo palindromic targets in order to compare activity with a standard TALE-AvrBs3::FokI TALEN (pCLS8590, SEQ ID NO: 244), which requires two binding sites for activity. AvrBs3 targets contain two identical recognition sequences juxtaposed with the 3′ ends proximal and separated by “spacer” DNA ranging from 5 to 40 bps (SEQ ID NO: 157 to 192, Table 7). In addition, TALE-AvrBs3::NucA constructs were tested on a target having only a single AvrBs3 recognition site (SEQ ID NO: 224). Data summarized in FIG. 11 show that TALE-AvrBs3::NucA constructs are active on all targets having at least one AvrBs3 recognition site, according to the cTALEN of the present invention.

### Example 3d

### TALE::ColE7 Compact TALEN

[0354] The catalytic domain of ColE7 (SEQ ID NO: 140), a nonspecific endonuclease from E. coli, was fused to a TALE-derived scaffold (composed of a N-terminal domain, a central core composed of RVDs and a C-terminal domain) to create a new class of cTALEN (TALE::ColE7). To distinguish the orientation (N-terminal vs. C-terminal) of the catalytic domain (CD) fusions, construct names are written as either CD::TALE-RVD (catalytic domain is fused N-terminal to the TALE domain) or TALE-RVD::CD (catalytic domain is fused C-terminal to the TALE domain), where “-RVD” optionally designates the sequence recognized by the TALE domain and “CD” is the catalytic domain type. Herein, we describe novel TALE::ColE7 constructions that target for example the AvrBs3 sequence, and are thus named TALE-AvrBs3::ColE7. Notably, the wild-type ColE7 endonuclease can be inhibited by complex formation with the Im7 immunity protein (SEQ ID NO: 230). In a compact TALEN context, the Im7 protein can function as an auxiliary domain to modulate the nuclease activity of TALE::ColE7 constructs.

[0355] Activity of TALE::ColE7 in Yeast

[0356] A core TALE scaffold, sT2 (SEQ ID NO: 135), was selected onto which (a) different sets of RVD domains could be inserted to change DNA binding specificity, and; (b) a selection of ColE7-derived catalytic domains could be attached, N- or C-terminal, to effect DNA cleavage (or nicking). As previously mentioned, the sT2 truncated scaffold was generated by the PCR from a full-length core TALEN scaffold template (pCLS7183, SEQ ID NO: 141) using primers CMP_G061 (SEQ ID NO: 142) and CMP_G065 (SEQ ID NO: 143) and was cloned into vector pCLS7865 (SEQ ID NO: 144) to generate pCLS7865-cTAL11_CFS1 (pCLS9009, SEQ ID NO: 145), where CFS1 designates the amino acid sequence -GSSG- (with underlying restriction sites BamHI and Kpn21 in the coding DNA to facilitate cloning). The ColE7 (SEQ ID NO: 140) catalytic domain was subcloned into the pCLS9009 backbone by restriction and ligation using Kpn2I and EagI restriction sites, yielding pCLS7865-cT11_ColE7 (pCLS9939, SEQ ID NO: 231, encoding the protein of SEQ ID NO: 435). The fusion contains the dipeptide -GSSG- linking the TALE-derived DNA binding domain and ColE7-derived catalytic domain.

[0357] The DNA sequence coding for the RVDs to target the AvrBs3 site (SEQ ID NO: 152) was subcloned into plasmid pCLS9939 (SEQ ID NO: 231) using Type IIS restriction enzymes BsmBI for the receiving plasmid and BbvI and SfaNI for the inserted RVD sequence to create the subsequent TALE-AvrBs3::ColE7 construct cT11Avr_ColE7 (pCLS9940, SEQ ID NO: 232, encoding the protein of SEQ ID NO: 436). The TALE-AvrBs3::ColE7 construct was sequenced and the insert transferred to additional vectors as needed (see below).

[0358] The final TALE-AvrBs3::ColE7 yeast expression plasmid, pCLS8589 (SEQ ID NO: 233), was prepared by yeast in vivo cloning using plasmid pCLS9940 (SEQ ID NO: 232). To generate an intact coding sequence by in vivo homologous recombination, approximately 40 ng of plasmid (pCLS9940) linearized by digestion with BssHII and 1 ng of the pCLS0542 (SEQ ID NO: 156) plasmid DNA linearized by digestion with NcoI and EagI were used to transform the yeast S. cerevisiae strain FYC2-6A (MATα, trp1Δ63, leu2Δ1, his3Δ200) using a high efficiency LiAc transformation protocol (Arnould et al. 2007).

[0359] All the yeast target reporter plasmids containing the TALEN DNA target sequences were constructed as previously described (International PCT Applications WO 2004/067736 and in Epinat, Arnould et al. 2003; Chames, Epinat et al. 2005; Arnould, Chames et al. 2006; Smith, Grizot et al. 2006).

[0360] The TALE-AvrBs3::ColE7 construct was tested in a yeast SSA assay as previously described (International PCT Applications WO 2004/067736 and in Epinat, Arnould et al. 2003; Chames, Epinat et al. 2005; Arnould, Chames et al. 2006; Smith, Grizot et al. 2006) on pseudo palindromic targets in order to compare activity with a standard TALE-AvrBs3::FokI TALEN (pCLS8590, SEQ ID NO: 244), which requires two binding sites for activity. AvrBs3 targets contain two identical recognition sequences juxtaposed with the 3′ ends proximal and separated by “spacer” DNA ranging from 5 to 40 bps (SEQ ID NO: 157 to 192, Table 7). In addition, constructs were tested on a target having only a single AvrBs3 recognition site (SEQ ID NO: 224, Table 7). TALE-AvrBs3::ColE7 activity levels on the respective targets in yeast cells are shown in FIG. 12.

[0361] Activity of TALE::ColE7 in Plants

[0362] The DNA sequence coding for the RVDs to target the NptIIT5-L and NptIIT6-L sites (SEQ ID NO: 276 to 279) were subcloned into plasmid pCLS15785 (SEQ ID NO: 285, a C-terminally modified ColE7 K497A mutant of plasmid pCLS9939, SEQ ID NO: 231) using Type IIS restriction enzymes BsmBI for the receiving plasmid and BbvI and SfaNI for the inserted RVD sequences to create the subsequent TALE::ColE7_A497 constructs cT11NptIIT5-L_ColE7_A497 (pCLS15786, SEQ ID NO: 286) and cT11NptIIT6-L_ColE7_A497 (pCLS15787, SEQ ID NO: 287), respectively. The constructs were sequenced and the TALE::ColE7_A497 inserts transferred by standard cloning techniques to plasmid pCLS14529 (SEQ ID NO: 282) to generate the final TALE-NptIIT5-L::ColE7_A497 and TALE-NptIIT6-L::ColE7_A497 expression plasmids, pCLS14584 (SEQ ID NO: 288, encoding the protein of SEQ ID NO: 437) and pCLS14587 (SEQ ID NO: 289, encoding the protein of SEQ ID NO: 438), respectively. Plasmid pCLS14529 allows for cloning gene of interest sequences downstream of a promoter that confers high levels of constitutive expression in plant cells.

[0363] To test activity in plant cells, a YFP-based single-strand annealing (SSA) assay was employed. The YFP reporter gene has a short duplication of coding sequence that is interrupted by either an NptIIT5 or NptIIT6 TALEN target site. Cleavage at the target site stimulates recombination between the repeats, resulting in reconstitution of a functional YFP gene. To quantify cleavage, the reporter is introduced along with a construct encoding a FokI-based TALEN or compact TALEN into tobacco protoplasts by PEG-mediated transformation. Uniform transformation efficiencies were obtained by using the same amount of plasmid in each transformation—i.e. 15 μg each of plasmids encoding YFP and either the TALEN or cTALEN. After 24 hours, the protoplasts were subjected to flow cytometry to quantify the number of YFP positive cells. The TALE:: ColE7_A497 activity levels, using cTALENs according to the present invention, in plants were comparable to those of a FokI-based TALEN control constructs on the targets tested (Table 10).

TABLE 10
Activity of TALE-NptIIT5-L::ColE7_A497 and TALE-NptIIT6-
L::ColE7_A497 on appropriate DNA targets.

| | TALEN Construct | | | |
|---|---|---|---|---|
| | TALE- | | TALE- | |
| Target | NptIIT5-L:: | NptII5.1 | NptIIT6-L:: | NptII6.1 |
| DNA | ColE7_A497 | control | ColE7_A497 | control |
| NptII5.1 | + | + | n.a. | n.a. |
| NptII6.1 | n.a. | n.a. | + | + |

Relative activity is scaled to the control constructs as:
n.a., not applicable;
+, 100% activity of control (8% YFP positive cells).

[0364] Engineering of the TALE::ColE7

[0365] Variants differing by truncations of the C-terminal domain of the AvrBs3-derived TALEN (SEQ ID NO: 196) are chosen as starting scaffolds. A subset of these variants includes truncation after positions E886 (C0), P897 (C11), G914 (C28), L926 (C40), D950 (C64), R1000 (C115), D1059 (C172) (the protein domains of truncated C-terminal domains C11 to C172 are respectively given in SEQ ID NO: 204 to 209) and P1117 [also referred as Cter wt or WT Cter (SEQ ID NO: 210) lacking the activation domain of the C-terminal domain of natural AvrBs3 (SEQ ID NO: 220)]. The plasmids coding for the variant scaffolds containing the AvrBs3-derived N-terminal domain, the AvrBs3-derived set of repeat domains and the truncated AvrBs3-derived C-terminal domain [pCLS7821, pCLS7803, pCLS7807, pCLS7809, pCLS7811, pCLS7813, pCLS7817 (SEQ ID NO: 211 to 217) which are based on the pCLS7184 (SEQ ID NO: 196)] allow cloning of any catalytic domain in fusion to the C-terminal domain, using the restriction sites BamHI and EagI.

[0366] The DNA corresponding to the catalytic domain of ColE7 is amplified by the PCR to introduce, at the DNA level, a BamHI (at the 5′ of the coding strand) and a EagI (at the 3′ of the coding strand) restriction site and, at the protein level, a linker (for example -SGGSGS- stretch, SEQ ID NO: 219) between the C terminal domain of the TALE and the ColE7 catalytic domain. Additionally, variants of the ColE7 endonuclease domain that modulate catalytic activity can be generated having changes (individually or combined) at the following positions: K446, R447, D493, R496, K497, H545, N560 and H573 [positions refer to the amino acid sequence of the entire ColE7 protein (SEQ ID NO: 11)]. The final TALE::ColE7 constructs are generated by insertion of the ColE7 catalytic domain into the scaffold variants using BamHIH and EagI and standard molecular biology procedures.

[0367] All the yeast target reporter plasmids containing the TALEN DNA target sequences were constructed as previously described (International PCT Applications WO 2004/067736 and in Epinat, Arnould et al. 2003; Chames, Epinat et al. 2005; Arnould, Chames et al. 2006; Smith, Grizot et al. 2006).

[0368] The TALE-AvrBs3::ColE7 constructs are tested in a yeast SSA assay as previously described (International PCT Applications WO 2004/067736 and in Epinat, Arnould et al. 2003; Chames, Epinat et al. 2005; Arnould, Chames et al. 2006; Smith, Grizot et al. 2006) on pseudo palindromic targets in order to compare activity with a standard TALE-AvrBs3::FokI TALEN (pCLS8590, SEQ ID NO: 244), which requires two binding sites for activity. AvrBs3 targets contain two identical recognition sequences juxtaposed with the 3′ ends proximal and separated by “spacer” DNA ranging from 5 to 40 bps (SEQ ID NO: 157 to 192, Table 7). In addition, constructs were tested on a target having only a single AvrBs3 recognition site (SEQ ID NO: 224, Table 7).

### Example 3e

### TALE::CreI Compact TALEN

[0369] The wild-type I-CreI meganuclease (SEQ ID NO: 106) was chosen as a protein template to derive a sequence-specific catalytic domain that when fused to a TALE-derived scaffold (composed of a N-terminal domain, a central core composed of RVDs and a C-terminal domain) would generate a new class of cTALEN (TALE::CreI). To distinguish the orientation (N-terminal vs. C-terminal) of the catalytic domain (CD) fusions, construct names are written as either CD::TALE-RVD (catalytic domain is fused N-terminal to the TALE domain) or TALE-RVD::CD (catalytic domain is fused C-terminal to the TALE domain), where “-RVD” optionally designates the sequence recognized by the TALE domain and “CD” is the catalytic domain type. Herein, we describe novel TALE::CreI-based constructions that target for example the T cell receptor B gene (TCRB gene, SEQ ID NO: 290, FIG. 13) sequence, both via the TALE DNA binding domain and the re-engineered I-CreI domain. Notably, specificity of the TALE::CreI compact TALEN is driven by both the TALE DNA binding domain as well as the I-CreI-derived catalytic domain. In a compact TALEN context, such proteins can provide, within a reasonably-sized monomeric protein, the requisite high specificity demanded by therapeutic applications.

[0370] Activity of TALE::CreI in Yeast

[0371] A core TALE scaffold, sT2 (SEQ ID NO: 135), was selected onto which (a) different sets of RVD domains could be inserted to change DNA binding specificity, and; (b) a selection of I-CreI-derived catalytic domains could be attached, N- or C-terminal, to effect DNA cleavage (or nicking). As previously mentioned, the sT2 truncated scaffold was generated by the PCR from a full-length core TALEN scaffold template (pCLS7183, SEQ ID NO: 141) using primers CMP_G061 (SEQ ID NO: 142) and CMP_G065 (SEQ ID NO: 143) and was cloned into vector pCLS7865 (SEQ ID NO: 144) to generate pCLS7865-cTAL11_CFS1 (pCLS9009, SEQ ID NO: 145), where CFS1 designates the amino acid sequence -GSSG- (with underlying restriction sites BamHI and Kpn21 in the coding DNA to facilitate cloning). A re-engineered I-CreI catalytic domain, designed to target a sequence in the T cell receptor B gene (TCRB gene, SEQ ID NO: 290, FIG. 13), was subcloned in two steps. First, the I-CreI_NFS1 (SEQ ID NO: 122) scaffold, where NFS1 (SEQ ID NO: 98) comprises a linker of 20 amino acids -GSDITKSKISEKMKGQGPSG- (with underlying restriction sites BamHI and Kpn21 in the coding DNA to facilitate cloning), was fused to the pCLS7865-cTAL11_CFS1 scaffold (using BamHIH and EagI restriction sites) to insert the NFS1 linker in-frame to the coding sequence. The I-CreI meganuclease was subsequently replaced by the engineered TCRB02-A meganuclease (pCLS6857, SEQ ID NO: 291) construct using Kpn2I and XhoI restriction sites, yielding pCLS7865-cT11_scTB2aD01 (pCLS15788, SEQ ID NO: 292, encoding the protein of SEQ ID NO: 439). Two point-mutant variants of the TCRB02-A meganuclease, TCRB02-A_{—}148C (pCLS12083, SEQ ID NO: 293, encoding the protein of SEQ ID NO: 442) and TCRB02-A_{—}333C (pCLS12195, SEQ ID NO: 294, encoding the protein of SEQ ID NO: 443), were also subcloned as catalytic domains fused to a TALE binding core, yielding constructs pCLS7865-cT11_scTB2aD01_{—}148C (pCLS15789, SEQ ID NO: 295, encoding the protein of SEQ ID NO: 440) and pCLS7865-cT11_scTB2aD01_{—}333C (pCLS15790, SEQ ID NO: 296, encoding the protein of SEQ ID NO: 441).

[0372] Three DNA sequences coding for RVDs that target the TCRB gene were designed at different distances from the meganuclease site, leading to RVDs TCRBO2A1 (SEQ ID NO: 297), TCRB02A2 (SEQ ID NO: 298) and TCRBO2A3 (SEQ ID NO: 299) that target sequences located 7 bp, 12 by and 16 bp, respectively, upstream of the meganuclease TCRB site (FIG. 13). DNA sequences for each RVD were independently subcloned into plasmid pCLS15788 (SEQ ID NO: 292) using Type IIS restriction enzymes BsmBI for the receiving plasmid and BbvI and SfaNI for the inserted RVD sequence to create the subsequent TALE::scTB2aD01 constructs cT11TB2A1_scTB2aD01 (pCLS15791, SEQ ID NO: 300), cT11TB2A2_scTB2aD01 (pCLS15792, SEQ ID NO: 301) and cT11TB2A3_scTB2aD01 (pCLS15793, SEQ ID NO: 302). Additionally, the TCRBO2A2 (SEQ ID NO: 298) RVDs were similarly cloned into pCLS15789 (SEQ ID NO: 295) to create cT11TB2A2_scTB2aD01_{—}148C (pCLS15794, SEQ ID NO: 303). All constructs were sequenced and the various inserts transferred to additional vectors as needed (see below).

[0373] The final TALE::scTB2aD01 yeast expression plasmids, pCLS13449 (SEQ ID NO: 304, encoding the protein of SEQ ID NO: 444), pCLS13450 (SEQ ID NO: 305, encoding the protein of SEQ ID NO: 445), pCLS13451 (SEQ ID NO: 306, encoding the protein of SEQ ID NO: 446) and pCLS15148 (SEQ ID NO: 307, encoding the protein of SEQ ID NO: 455), were prepared by yeast in vivo cloning using plasmids pCLS15791 (SEQ ID NO: 300), pCLS15792 (SEQ ID NO: 301), pCLS15793 (SEQ ID NO: 302) and pCLS15794 (SEQ ID NO: 303), respectively. To generate an intact coding sequence by in vivo homologous recombination, approximately 40 ng of each plasmid linearized by digestion with BssHII and 1 ng of the pCLS0542 (SEQ ID NO: 156) plasmid DNA linearized by digestion with NcoI and EagI were used to transform, respectively, the yeast S. cerevisiae strain FYC2-6A (MATα, trp1Δ63, leu2Δ1, his3Δ200) using a high efficiency LiAc transformation protocol (Arnould et al. 2007).

[0374] All the yeast target reporter plasmids containing the TALEN or meganuclease DNA target sequences were constructed as previously described (International PCT Applications WO 2004/067736 and in Epinat, Arnould et al. 2003; Chames, Epinat et al. 2005; Arnould, Chames et al. 2006; Smith, Grizot et al. 2006).

[0375] The TALE::scTB2aD01-based constructs were tested in a yeast SSA assay as previously described (International PCT Applications WO 2004/067736 and in Epinat, Arnould et al. 2003; Chames, Epinat et al. 2005; Arnould, Chames et al. 2006; Smith, Grizot et al. 2006) on hybrid targets TCRBO2Tsp7 (SEQ ID NO: AC4), TCRBO2Tsp12 (SEQ ID NO: AC5) and TCRBO2Tsp16 (SEQ ID NO: AC6), illustrated in FIG. 14. The TCRB02.1-only target was included to compare activity with the engineered TCRB02-A meganuclease (pCLS6857, SEQ ID NO: 291), which does not require the TALE DNA binding sites for activity. Activity levels on the respective targets in yeast cells for the indicated TALE::scTB2aD01-based constructs are shown in FIG. 14. Notably, under the in vivo conditions tested the TALE-TB2A2::scTB2aD01_{—}148C (pCLS15794, SEQ ID NO: 303) construct no longer cleaves targets lacking the DNA sequence recognized by the TALE DNA binding moiety.

[0376] Activity of TALE::CreI in Mammalian Cells

[0377] DNA encoding the TALE-TB2A2::scTB2aD01 and TALE-TB2A3::scTB2aD01 constructs from pCLS15792 (SEQ ID NO: 301) and pCLS15793 (SEQ ID NO: 302) were subcloned into the pCLS1853 (SEQ ID NO: 193) mammalian expression plasmid using Ascl and XhoI restriction enzymes for the receiving plasmid and BssHII and XhoI restriction enzymes for TALE::scTB2aD01-based inserts, leading to the mammalian expression plasmids pCLS14894 and pCLS14895 (SEQ ID NO: 308 and 309), respectively.

[0378] All mammalian target reporter plasmids containing the TALEN DNA target sequences were constructed using the standard Gateway protocol (INVITROGEN) into a CHO reporter vector (Arnould, Chames et al. 2006, Grizot, Epinat et al. 2010).

[0379] To monitor protein expression levels, TALE::scTB2aD01-based constructs were transfected in mammalian cells (HEK293) alongside the engineered TCRB02-A meganuclease (pCLS6857, SEQ ID NO: 291). Briefly, cells were transfected, respectively, with 300 ng of each protein encoding plasmid in the presence of lipofectamine. Fourty-eight hours post-transfection, 20 μg of total protein extract for each sample was analyzed by Western-Blot using a polyclonal anti-1-CreI antibody. A typical western-blot is shown in FIG. 15.

[0380] Relative toxicity of the TALE::scTB2aD01-based constructs was assessed using a cell survival assay. CHOK1 cells were used to seed plates at a density of 2.5*10³ cells per well. The following day, varying amounts of plasmid encoding either the TALE::scTB2aD01-based constructs (pCLS14894 and pCLS14895; SEQ ID NO: 308 and 309) or the engineered TCRB02-A meganuclease (pCLS6857, SEQ ID NO: 291) and a constant amount of GFP-encoding plasmid (10 ng) were used to transfect the cells with a total quantity of 200 ng using Polyfect reagent. GFP levels were monitored by flow cytometry (Guava Easycyte, Guava technologies) on days 1 and 6 post-transfection. Cell survival is expressed as a percentage, calculated as a ratio (TALEN and meganuclease-transfected cells expressing GFP on Day 6/control-transfected cells expressing GFP on Day 6) corrected for the transfection efficiency determined on Day 1. Typical cell survival assay data are shown in FIG. 16.

[0381] Cleavage activity in vivo was monitored via detection of NHEJ events in the presence of TREX2 exonuclease. Plasmid (3 μg) encoding either the TALE::scTB2aD01-based constructs (pCLS14894 and pCLS14895; SEQ ID NO: 308 and 309) or the engineered TCRB02-A meganuclease (pCLS6857, SEQ ID NO: 291) and 2 μg of scTrex2-encoding plasmid (pCLS8982, SEQ ID NO: 310) were used to transfect the HEK293 cells in the presence of lipofectamine. Genomic DNA was extracted 2 and 7 days post-transfection with the DNeasy Blood and Tissue kit (Qiagen) and the region encompassing the TCRB02 site (FIG. 13) was amplified using the PCR with oligos TRBC2F3 (Seq ID NO: 311) and TRBC2R3B (SEQ ID NO: 312) at day 2 post-transfection and with oligos TRBC2F4 (SEQ ID NO: 315) and TRBC2R4B (SEQ ID NO: 314) at day 7 post-transfection. Respective PCR products (100 ng) were heat denatured, allowed to re-anneal by slow-cooling then treated with T7 endonuclease 1 (NEB) for 15 minutes at 37° C. Digested PCR products are separated on 10% acrylamide gels and visualized with SYBRgreen (Invitrogen) staining. Cleavage of mismatched DNA sequences by T7 endonuclease is indicative of NHEJ events resulting from the activity of the cTALEN or meganuclease at the targeted locus. FIG. 17 illustrates the detectable NHEJ activity of the TALE::scTB2aD01-based constructs (pCLS14894 and pCLS14895; SEQ ID NO: 308 and 309) compared to the engineered TCRB02-A meganuclease (pCLS6857, SEQ ID NO: 291). Whereas at day 2 NHEJ results are comparable for all constructs, NHEJ activity at day 7 can only be detected for the TALE::scTB2aD01-based constructs, suggesting that these compact TALENs do not induce cytotoxicity.

[0382] Engineering of the TALE::CreI

[0383] A significant novel property of the TALE::CreI compact TALEN resides in the ability to independently engineer the “hybrid” specificity of the final molecule. As such, the inherent activity/specificity ratio can be modulated within the TALE::CreI-derived constructs, allowing for unprecedented specific targeting with retention of high DNA cleavage activity. In its simplest form, successful re-targeting of the TALE DNA binding domain is achieved via the RVD cipher (FIG. 3), with a pseudo one-to-one correspondence to the underlying DNA base. Engineering of the I-CreI moiety, however, presents more challenges insomuch as there exists a potential codependence of protein-DNA contacts needed for suitable DNA binding and cleavage activity. Methods have been described (WO2006097854, WO2008093249, WO03078619, WO2009095793, WO 2007/049095, WO 2007/057781, WO 2006/097784, WO 2006/097853, WO 2007/060495, WO 2007/049156 and WO 2004/067736) to successfully re-engineer the I-CreI meganuclease to target novel DNA sequences. As some of these methods rely on a clustered approach, it can be envisioned that using said approach the “absolute” specificity of the I-CreI moiety could be reduced in a stepwise manner. For example, the breakdown of the I-CreI DNA interaction surface into discrete 10NNN, 7NN, 5NNN and 2NN regions (per monomeric subunit half) allows for novel engineering wherein high specificity is maintained in the central 5NNN-2NN region at the expense of “loose” or broad specificity in the outer 10NNN-7NN regions. In essence such an approach could reduce the complexity of re-engineering the I-CreI-derived scaffold for a compact TALEN context as only “selectivity” in cleavage is required for the catalytic domain, with subsequent specificity provided by the TALE DNA binding part of the protein fusion. Taken together, the ease of engineering combined with the potential high specificity and high DNA cleavage activity make TALE::CreI-derived compact TALENs ideal tools for therapeutic applications. Finally, it should be noted that the I-CreI moiety could in principle be replaced with a host of naturally existing or re-engineered homing endonuclease-derived catalytic domains.

### Example 3f

### Activity of TALE::SnaseSTAUU

[0384] Activity of TALE::SnaseSTAUU in Yeast

[0385] Variants differing by truncations of the C-terminal domain of the AvrBs3-derived TALEN (SEQ ID Na: 196) are chosen as starting scaffolds. A subset of these variants includes truncation after positions G914 (C28) and L926 (C40) (the protein domains of truncated C-terminal domains C28 and C40 are respectively given in SEQ ID NO: 205 and 206). The plasmids coding for the variant scaffolds containing the AvrBs3-derived N-terminal domain, the AvrBs3-derived set of repeat domains and the truncated AvrBs3-derived C-terminal domain [pCLS7807 and pCLS7809, (SEQ ID NO: 213 and 214) which are based on the pCLS7184 (SEQ ID Na: 196)] allow cloning of any catalytic domain in fusion to the C-terminal domain, using the restriction sites BamHI and EagI.

[0386] The DNA corresponding to amino acid residues 83 to 231 of SnaseSTAAU (SEQ ID NO: 30) is amplified by the PCR to introduce, at the DNA level, a BamHI (at the 5′ of the coding strand) and a EagI (at the 3′ of the coding strand) restriction site and, at the protein level, a linker (for example -SGGSGS- stretch, SEQ ID NO: 219) between the C terminal domain of the TALE and the SnaseSTAAU catalytic domain. The final TALE::SnaseSTAAU constructs are generated by insertion of the SnaseSTAAU catalytic domain into the scaffold variants using BamHI and EagI and standard molecular biology procedures. Scaffold variants truncated after positions G914 (C28) and L926 (C40), respectively encoded by pCLS7807 and pCLS7809, (SEQ ID NO: 213 and 214), were fused to the SnaseSTAAU catalytic domain (SEQ ID NO: 30), leading to pCLS9082 and pCLS9081 (SEQ ID NO: 370 and 371). The cloning step also brings at the amino acid level an AAD sequence at the Cter of the SnaseSTAAU catalytic domain.

[0387] All the yeast target reporter plasmids containing the TALEN DNA target sequences were constructed as previously described (International PCT Applications WO 2004/067736 and in Epinat, Arnould et al. 2003; Chames, Epinat et al. 2005; Arnould, Chames et al. 2006; Smith, Grizot et al. 2006).

[0388] The TALE-AvrBs3:: SnaseSTAAU constructs were tested in a yeast SSA assay as previously described (International PCT Applications WO 2004/067736 and in Epinat, Arnould et al. 2003; Chames, Epinat et al. 2005; Arnould, Chames et al. 2006; Smith, Grizot et al. 2006) on pseudo palindromic targets in order to compare activity with a standard TALE-AvrBs3::FokI TALEN, which requires two binding sites for activity. AvrBs3 targets contain two identical recognition sequences juxtaposed with the 3′ ends proximal and separated by “spacer” DNA ranging from 5 to 40 bps (SEQ ID NO: 157 to 192, Table 7). In addition, TALE-AvrBs3::SnaseSTAAU constructs were tested on a target having only a single AvrBs3 recognition site (SEQ ID NO: 224). Data summarized in FIG. 19 show that TALE-AvrBs3::SnaseSTAAU constructs are active on targets having two AvrBs3 recognition site, according to the chimeric protein of the present invention, but also on targets containing only one AvrBs3 recognition site.

### Example 4

[0389] Basic cTALENs are composed of a single DNA binding domain fused to a single catalytic domain and are designed to stimulate HR via a single double-strand DNA cleavage or single-strand nicking event. For certain applications (e.g. gene inactivation), it is favorable to enhance the level of NHEJ. This example illustrates the creation of a dual-cleavage cTALEN (dcTALEN) that is capable of effecting cleavage of double-strand DNA at two distinct sites flanking the TALE DNA binding domain (FIG. 5C). The simultaneous cleavage of the DNA at the two sites is expected to eliminate the intervening sequence and therefore abolish “scarless” re-ligation by NHEJ (FIG. 1).

[0390] The baseline scaffolds (SEQ ID NO: 136 to SEQ ID NO: 139) described in Example 3 are used as starting points for fusion designs. A non-exhaustive list of catalytic domains amenable to fusion with TALE DNA binding domains is presented in Table 2. A non-exhaustive list of linkers that can be used is presented in Table 3. See examples 3, 5, 6 and 7 for additional details concerning the choice of linker or enhancement domain. For the dcTALEN designs, at least one cleavase domain is fused (N- or C-terminal) to the TALE DNA binding domain. The additional catalytic domain can be either a nickase of cleavase (endonuclease or exonuclease) domain, and depends on the nature of the application. For example, the coupling of a cleavase domain on one side with a nickase domain on the other could result in excision of a single-strand of DNA spanning the TALE DNA binding region. The targeted generation of extended single-strand overhangs could be applied in applications that target DNA repair mechanisms. For targeted gene inactivation, the use of two cleavase domains in the dcTALEN is preferred.

[0391] All dcTALEN designs are assessed using our yeast assay (see Example 1) and provide detectable activity comparable to existing engineered meganucleases. Furthermore, potential enhancements in NHEJ are monitored using the mammalian cell based assay as described in Example 3.

### Example 4a

### Activity of TevI::TALE::FokI and TevI::TALE::TevI Dual Cleavage TALENs

[0392] Dual cleavage TALENs (CD::TALE::CD), possessing an N-terminal I-TevI-derived catalytic domain and a C-terminal catalytic domain derived from either FokI (SEQ ID NO:368) or I-TevI (SEQ ID NO: 20), were generated on the baseline bT2-Avr (SEQ ID NO: 137) scaffold. The catalytic domain fragment of I-TevI was excised from plasmid pCLS12731 (SEQ ID NO: 236) and subcloned into vectors pCLS15795 (SEQ ID NO: 351) and pCLS9013 (SEQ ID NO: 153) by restriction and ligation using NcoI and NsiI restriction sites, yielding TevD02_cT11Avr_FokI-L (pCLS15796, SEQ ID NO: 352, encoding the protein of SEQ ID NO: 447) and TevD02_cT11Avr_TevD02 (pCLS15797, SEQ ID NO: 353, encoding the protein of SEQ ID NO: 448), respectively. All constructs were sequenced and the insert transferred to additional vectors as needed (see below).

[0393] The final TevI::TALE-AvrBs3::FokI and TevI::TALE-AvrBs3::TevI yeast expression plasmids, pCLS13299 (SEQ ID NO: 354, encoding the protein of SEQ ID NO: 449) and pCLS13301 (SEQ ID NO: 355, encoding the protein of SEQ ID NO: 450), were prepared by yeast in vivo cloning using plasmids pCLS15796 (SEQ ID NO: 352) and pCLS15797 (SEQ ID NO: 353), respectively. To generate an intact coding sequence by in vivo homologous recombination, approximately 40 ng of each plasmid linearized by digestion with BssHII and 1 ng of the pCLS0542 (SEQ ID NO: 156) plasmid DNA linearized by digestion with NcoI and EagI were used to transform, respectively, the yeast S. cerevisiae strain FYC2-6A (MATa, trp1Δ63, leu2Δ1, his3Δ200) using a high efficiency LiAc transformation protocol (Arnould et al. 2007).

[0394] All the yeast target reporter plasmids containing the TALEN DNA target sequences were constructed as previously described (International PCT Applications WO 2004/067736 and in Epinat, Arnould et al. 2003; Chames, Epinat et al. 2005; Arnould, Chames et al. 2006; Smith, Grizot et al. 2006).

[0395] The TevI::TALE-AvrBs3::FokI and TevI::TALE-AvrBs3::TevI constructs were tested in a yeast SSA assay as previously described (International PCT Applications WO 2004/067736 and in Epinat, Arnould et al. 2003; Chames, Epinat et al. 2005; Arnould, Chames et al. 2006; Smith, Grizot et al. 2006) on pseudo palindromic targets in order to compare activity with a standard TALE-AvrBs3::FokI TALEN (pCLS8590, SEQ ID NO: 244), which requires two binding sites for activity. AvrBs3 targets contain two identical recognition sequences juxtaposed with the 3′ ends proximal and separated by “spacer” DNA ranging from 5 to 40 bps (SEQ ID NO: 157 to 192, Table 6). In addition, constructs were tested on a target having only a single AvrBs3 or RagT2-R recognition site (SEQ ID NO: 238, Table 11). On suitable targets, the TevI::TALE-AvrBs3::FokI and TevI::TALE-AvrBs3::TevI activity levels in yeast were comparable to those of their parent molecules lacking the N-terminal I-TevI-derived catalytic domain. Significant activity is illustrated in table 11 for a sample single-site target, according to the dcTALEN of the present invention.

TABLE 11
Activity of various cTALENs and dcTALENs
on dual- and single-site DNA targets.

| | Target DNA | |
|---|---|---|
| | | Avr25RAGT2R |
| | Avr25 (dual-site) | (single-site) |
| TALEN Construct | (SEQ ID NO: 177) | (SEQ ID NO: 238) |
| TevI::TALE-AvrBs3 | ++++ | +++ |
| TALE-AvrBs3::FokI | ++++ | n.d. |
| TALE-AvrBs3::TevI | ++++ | n.d. |
| TevI::TALE-AvrBs3::FokI | ++++ | +++ |
| TevI::TALE-AvrBs3::TevI | ++++ | +++ |

Relative activity is scaled as:
n.d., no activity detectable;
+, <25% activity;
++, 25% to <50% activity;
+++, 50% to <75% activity;
++++, 75% to 100% activity.

### Example 4b

### scTrex2::TALE::FokI Dual Cleavage TALEN

[0396] A dual cleavage TALEN(CD::TALE::CD), possessing an N-terminal scTrex2-derived catalytic domain and a C-terminal catalytic domain derived from Fokl, was generated on the baseline bT2-Avr (SEQ ID NO: 137) scaffold. The catalytic domain fragment of scTrex2 was excised from plasmid pCLS15798 (SEQ ID NO: 356, encoding the protein of SEQ ID NO: 451) and subcloned into vector pCLS15795 (SEQ ID NO: 351) by restriction and ligation using NcoI and NsiI restriction sites, yielding scTrex2_cT11Avr_FokI-L (pCLS15799, SEQ ID NO: 357, encoding the protein of SEQ ID NO: 452). The construct was sequenced and the insert transferred to additional vectors as needed (see below).

[0397] DNA encoding the TALE-AvrBs3::FokI or scTrex2::TALE-AvrBs3::FokI constructs from either pCLS15795 (SEQ ID NO: 351) or pCLS15799 (SEQ ID NO: 357), respectively, was subcloned into the pCLS1853 (SEQ ID NO: 193) mammalian expression plasmid using Ascl and XhoI restriction enzymes for the receiving plasmid and BssHII and XhoI restriction enzymes for the inserts, leading to the mammalian expression plasmids pCLS14972 and pCLS14971 (SEQ ID NO: 358 and 359), respectively.

[0398] All mammalian target reporter plasmids containing the TALEN DNA target sequences were constructed using the standard Gateway protocol (INVITROGEN) into a CHO reporter vector (Arnould, Chames et al. 2006, Grizot, Epinat et al. 2010). The TALE-AvrBs3::FokI and scTrex2::TALE-AvrBs3::Fokl constructs were tested in an extrachromosomal assay in mammalian cells (CHO K1) on pseudo palindromic targets in order to compare activity with a standard TALE-AvrBs3::FokI TALEN, which requires two binding sites for activity. AvrBs3 targets contain two identical recognition sequences juxtaposed with the 3′ ends proximal and separated by “spacer” DNA ranging from 5 to 40 bps (SEQ ID NO: 157 to 192, Table 6).

[0399] For this assay, CHO K1 cells were transfected in a 96-well plate format with 75 ng of target vector and an increasing quantity of each variant DNA from 0.7 to 25 ng, in the presence of PolyFect reagent (1 μL per well). The total amount of transfected DNA was completed to 125 ng (target DNA, variant DNA, carrier DNA) using an empty vector. Seventy-two hours after transfection, culture medium was removed and 150 μl of lysis/revelation buffer for β-galactosidase liquid assay was added. After incubation at 37° C., optical density was measured at 420 nm. The entire process is performed on an automated Velocityll BioCel platform (Grizot, Epinat et al. 2009).

[0400] Activity levels in mammalian cells on suitable targets for the scTrex2::TALE-AvrBs3::Fokl construct were comparable to those of the parent TALE-AvrBs3::FokI molecule, indicating that the extra scTrex2 moiety does not impair the TALEN DNA cleavage function. Assessment of the scTrex2 function is performed in assays suitable for the detection of NHEJ events.

### Example 5

[0401] Baseline designs for the cTALEN scaffolds are based on established TALE DNA binding domains. Compact TALENs are designed to be as small and efficient as possible. To obtain this goal it may therefore be necessary to enlist “enhancer” domains to bridge the functional gap between compact TALE DNA binding domains and the various catalytic domains. FIG. 6 (A-E) illustrates various non-exhaustive configurations wherein such enhancer domains can be applied. Note that the figure is illustrative only, and N— vs. C-terminal variations are implied (i.e. FIG. 6A can also have an N-terminal enhancer domain and C-terminal catalytic domain). Tables 1 and 2 lists potential enhancer domains that could assist in DNA binding (specific and non-specific contacts).

[0402] Enhanced TALENs (eTALENs) are created using functional cTALENS from Example 3. The addition of the enhancer domain is evaluated in our yeast assay (see Example 1). A particular enhancer domain is judged useful if it provides a minimal 5% enhancement in efficiency of the starting cTALEN, more preferably a minimal 10% enhancement, more preferably 20%, more preferably 30%, more preferably 40%, more preferably 50%, again more preferably an enhancement greater than 50%.

### Example 5a

### TALE::ColE7::TALE Enhanced TALENs

[0403] Enhanced TALENs (TALE::CD::TALE), possessing N- and C-terminal TALE DNA binding domains bordering a central DNA cleavage domain, were generated using the sT2 (SEQ ID NO: 135) core scaffold. The layout of this class of compact TALEN is illustrated in FIG. 6B, wherein the N-terminal “enhancer domain” is itself a TALE DNA binding domain. A point-mutant derivative of the ColE7 catalytic domain (pCLS15785, SEQ ID NO: 285) was chosen for the catalytic core of the eTALEN. Two final constructs, TALE-AvrBs3::ColE7_A497::TALE-RagT2-R (pCLS15800, SEQ ID NO: 360, encoding the protein of SEQ ID NO: 453) and TALE-RagT2-R::ColE7_A497::TALE-AvrBs3 (pCLS15801, SEQ ID NO: 361, encoding the protein of SEQ ID NO: 454), were obtained using standard molecular cloning techniques with DNA sequences from sT2 (SEQ ID NO: 135), pCLS15785 (SEQ ID NO: 285), AvrBs3 (SEQ ID NO: 152) and RagT2-R (SEQ ID NO: 271) as templates. All TALE::CD::TALE constructs were sequenced and the inserts transferred to additional vectors as needed (see below).

[0404] The final TALE::CD::TALE-based yeast expression plasmids, pCLS12106 (SEQ ID NO: 362) and pCLS12110 (SEQ ID NO: 363, were prepared by restriction and ligation using NcoI and EagI restriction sites to subclone into the pCLS0542 (SEQ ID NO: 156) plasmid. The yeast S. cerevisiae strain FYC2-6A (MATα, trp1Δ63, leu2Δ1, his3Δ200) was transformed using a high efficiency LiAc transformation protocol (Arnould et al. 2007).

[0405] All the yeast target reporter plasmids containing the TALEN DNA target sequences were constructed as previously described (International PCT Applications WO 2004/067736 and in Epinat, Arnould et al. 2003; Chames, Epinat et al. 2005; Arnould, Chames et al. 2006; Smith, Grizot et al. 2006).

[0406] The TALE::CD::TALE constructs are tested in a yeast SSA assay as previously described (International PCT Applications WO 2004/067736 and in Epinat, Arnould et al. 2003; Chames, Epinat et al. 2005; Arnould, Chames et al. 2006; Smith, Grizot et al. 2006) on asymmetric AvrBs3/RagT2-R hybrid targets in order to compare activity with a parent compact TALEN (e.g. pCLS8589, SEQ ID NO: 233), which has activity on targets with a single binding site. In addition, constructs are tested on a target having only a single AvrBs3 or RagT2-R recognition site.

### Example 6

[0407] To date, all known TAL effectors and derivatives thereof appear to require a T base at positions −1 (FIG. 3) in the recognition sequence. To overcome this limitation, an enhancer domain is used to replace the N-terminal region of the TALE protein. Sequence and structure-based homology modeling of the N-terminal TALE region of bT2-derivatives have yielded three potential candidate proteins (Table 1): (i) Fem-3 binding factor, SEQ ID NO: 4, (FBF1, Puf family of RNA binding proteins) from C. elegans; (ii) artificial alpha-helicoidal repeat proteins (aRep), SEQ ID NO: 5 and; (iii) proteins of the Ankyrin super-family. The content and arrangement of secondary structure elements allows for using these models as starting points for enhancer domains that replace the N-terminal region of the TALE protein.

[0408] Chimeric proteins are constructed using the analogous regions from one of the 3 candidates mentioned to replace the N-terminal TALE protein region up to the first canonical repeat domain. The new interface is redesigned in silico, using the homology models as guides. This approach can be used to pinpoint the determinants of specificity for the requisite T at position −1 of the target sequence. The replacement enhancer domain should at minimum provide structural integrity to the cTALEN protein. Constructs are evaluated in our yeast assay (see Example 1). A particular enhancer domain is judged useful if it provides a minimal 5% retention in activity of the starting cTALEN in the absence of a T at target position −1, more preferably a minimal 10% retention, more preferably 20%, more preferably 30%, more preferably 40%, more preferably 50%, again more preferably a retention in activity greater than 50%.

### Example 7

[0409] To generate more suitable and compact scaffolds for cTALENS, the nature of the C-terminal region (beyond the final half-repeat domain) of the TALE protein has been analyzed. Sequence and structure-based homology modeling of the C-terminal TALE region of bT2-derivatives have yielded three potential candidate proteins (Table 1): (i) the hydrolase/transferase of Pseudomonas Aeuriginosa, SEQ ID NO: 6; (ii) the Polymerase domain from the Mycobacterium tuberculosis Ligase D, SEQ ID NO: 7; (iii) initiation factor eIF2 from Pyrococcus, SEQ ID NO: 8; (iv) Translation Initiation Factor Aif2betagamma, SEQ ID NO: 9. As in example 6, homology models are used to pinpoint regions for generating possible C-terminal truncations; potential truncation positions include 28, 40, 64, 118, 136, 169, 190 residues remaining beyond the last half-repeat domain. Additionally, homologous regions from the aforementioned proteins can be used to replace the C-terminal domain entirely. Contact prediction programs can be used to identify, starting from the primary sequence of a protein, the pairs of residues that are likely proximal in the 3D space. Such chimeric proteins should provide more stable scaffolds on which to build cTALENs.

[0410] Constructs are evaluated in our yeast assay (see Example 1). A particular enhancer domain is judged useful if it provides a minimal 5% retention in activity of the starting cTALEN, more preferably a minimal 10% retention, more preferably 20%, more preferably 30%, more preferably 40%, more preferably 50%, again more preferably a retention in activity greater than 50%.

### Example 8

[0411] To generate compact TALENS with alternative activities, trans cTALENS are generated by (a) using a catalytic domain with separable activities (FIG. 7A, B), or; (b) providing an auxiliary activity as a TALE-fusion (FIG. 7C). Sequence and structure-based modeling of class III (Chan, Stoddard et al. 2011). TypellS restriction endonucleases (REases) were used to create trans TALENs (see Table 2 for a non-exhaustive list). The initial trans TALEN is generated via fusion of an independently active catalytic domain (e.g. the Nt.BspD6I nickase) as described in Examples 3 and 4. In principle this trans TALEN can be used as is depending on the application. To convert the cTALEN to a functional trans TALEN, the auxiliary domain (in this case, ss.BspD6I) is provided in trans (FIG. 8A). Such optionally trans and/or heterodimeric proteins can allow for cTALEN scaffolds with activity that can be modulated to a given application.

[0412] Constructs are evaluated in our yeast assay (see Example 1). A particular auxiliary domain is judged useful if it provides an alternative activity to that of the starting cTALEN.

[0413] If the auxiliary domain used exhibits activity independent of the initial cTALEN (i.e. in a non-trans TALEN context), it can as well be fused to a TALE domain for specific targeting (FIG. 7B). Auxiliary domains can also be provided in trans as targeted entities to provide functions unrelated to the cTALEN (FIG. 7C).

### Example 8a

### Specific Inhibition of TALEN Catalytic Activity

[0414] As mentioned in examples 3c and 3d, both NucA (SEQ ID NO: 26) and ColE7 (SEQ ID NO: 140) can be inhibited by complex formation with their respective inhibitor proteins, NuiA (SEQ ID NO: 229) and Im7 (SEQ ID NO: 230). Colicin-E9 (SEQ ID NO: 366) is another non-limiting example of protein which can be inhibited by its respective inhibitor Im9 (SEQ ID NO: 369). With respect to TALENs derived from the NucA (TALE::NucA) or ColE7 (TALE::ColE7) catalytic domains, the inhibitors serve as auxiliary domains (FIG. 7A) that modulate the activity by preventing DNA cleavage.

[0415] The Im7 (SEQ ID NO: 230) and NuiA (SEQ ID NO: 229) inhibitor proteins were subcloned into the pCLS7763 backbone (SEQ ID NO: 241) by restriction and ligation using NcoI and EagI restriction sites, yielding pCLS9922 (SEQ ID NO: 242) and pCLS9923 (SEQ ID NO: 243), respectively. These plasmids were then used in co-transformation experiments in the standard yeast SSA assay as previously described (International PCT Applications WO 2004/067736 and in Epinat, Arnould et al. 2003; Chames, Epinat et al. 2005; Arnould, Chames et al. 2006; Smith, Grizot et al. 2006).

[0416] All the yeast target reporter plasmids containing the TALEN DNA target sequences were constructed as previously described (International PCT Applications WO 2004/067736 and in Epinat, Arnould et al. 2003; Chames, Epinat et al. 2005; Arnould, Chames et al. 2006; Smith, Grizot et al. 2006).

[0417] TALE-AvrBs3::NucA (pCLS9924, SEQ ID NO: 223) and TALE-AvrBs3::ColE7 (pCLS8589, SEQ ID NO: 233) constructs were tested in a yeast SSA assay on pseudo palindromic targets in order to compare activity with a standard TALE-AvrBs3::FokI TALEN (pCLS8590, SEQ ID NO: 244), which requires two binding sites for activity. AvrBS3 targets contain two identical recognition sequences juxtaposed with the 3′ ends proximal and separated by “spacer” DNA ranging from 5 to 40 bps (SEQ ID NO: 157 to 192, Table 7). In addition, constructs were tested on a target having only a single AvrBs3 recognition site (SEQ ID NO: 224, Table 7). Activity modulation of the TALENs was assessed in the presence or absence of specific or unspecific inhibitor protein, using the TALE-AvrBs3::FokI TALEN as control.

[0418] Data summarized in table 12 indicate that TALE-AvrBs3::NucA and TALE-AvrBs3::ColE7 constructs are specifically inactivated by the presence of their respective inhibitor proteins NuiA and Im7, according to the present invention.

TABLE 12
Activity of TALEN constructs in the presence of inhibitor protein.

| | Inhibitor Protein | | |
|---|---|---|---|
| TALEN Construct | None | NuiA | Im7 |
| TALE-AvrBs3::NucA (SEQ ID NO: 223) | ++++ | n.d. | ++++ |
| TALE-AvrBs3::ColE7 (SEQ ID NO: 233) | ++++ | ++++ | n.d. |
| TALE-AvrBs3::FokI (SEQ ID NO: 244) | ++++ | ++++ | ++++ |

Relative activity is scaled as:
n.d., no activity detectable;
+, <25% activity;
++, 25% to <50% activity;
+++, 50% to <75% activity;
++++, 75% to 100% activity.

### Example 8b

### Enhancing TALEN Catalytic Activity Via a Trans TALEN

[0419] Example 3b illustrates that the TevI::TALE functions unassisted as a compact TALEN (pCLS8522, SEQ ID NO: 237). To further enhance activity, a trans TALEN was designed using a TALE::TevI construct in a layout depicted in FIG. 7C. The DNA sequence coding for the RVDs to target the RagT2-R site (SEQ ID NO: 271) was subcloned into plasmid pCLS7865-cT11_TevD02 (pCLS9011, SEQ ID NO: 151) using Type IIS restriction enzymes BsmBI for the receiving plasmid and BbvI and SfaNI for the inserted RVD sequence to create the subsequent TALE-RagT2-R::TevI construct cT11RagT2_R_TevD02 (pCLS15802, SEQ ID NO: 364). The construct was sequenced and the insert subcloned into the pCLS7763 backbone (SEQ ID NO: 241) by restriction and ligation using NcoI and EagI restriction sites, yielding pCLS8990 (SEQ ID NO: 365). Plasmid pairs pCLS8522 (SEQ ID NO: 237) and pCLS7763 (SEQ ID NO: 241) or pCLS8522 (SEQ ID NO: 237) and pCLS8990 (SEQ ID NO: 365) were then used in co-transformation experiments in the standard yeast SSA assay as previously described (International PCT Applications WO 2004/067736 and in Epinat, Arnould et al. 2003; Chames, Epinat et al. 2005; Arnould, Chames et al. 2006; Smith, Grizot et al. 2006).

[0420] All the yeast target reporter plasmids containing the TALEN DNA target sequences were constructed as previously described (International PCT Applications WO 2004/067736 and in Epinat, Arnould et al. 2003; Chames, Epinat et al. 2005; Arnould, Chames et al. 2006; Smith, Grizot et al. 2006).

[0421] The TALE-RagT2-R::TevI/TevI::TALE-AvrBs3 construct pairs were tested in a yeast SSA assay as previously described (International PCT Applications WO 2004/067736 and in Epinat, Arnould et al. 2003; Chames, Epinat et al. 2005; Arnould, Chames et al. 2006; Smith, Grizot et al. 2006) on asymmetric RagT2-R/AvrBs3 hybrid targets in order to compare activity with a parent compact TALEN (e.g. pCLS8522, SEQ ID NO: 237), which has activity on targets with a single binding site. RagT2-R/AvrBs3 hybrid targets contain two different recognition sequences juxtaposed with the 3′ end of the first (RagT2-R) proximal to the 5′ end of the second (AvrBs3) and separated by “spacer” DNA ranging from 5 to 40 bps (SEQ ID NO: G064 to G099, Table 13). FIG. 18 illustrates the modulation in TevI::TALE-AvrBs3 activity provided by the TALE-RagT2-R::TevI construct, according to the trans cTALEN of the present invention.

### Example 9

### Replacement of the C-Terminal Domain by a Polypeptide Linker, Activity with colE7 Catalytic Domain

[0422] We generated a first library of 37 different linkers. Many of them have a common structure comprising a variable region encoding 3 to 28 amino acids residues and flanked by regions encoding SGGSGS stretch (SEQ ID NO: 219) at both the 5′ and a 3′ end (SEQ ID NO: 372 to 408). These linkers contain XmaI and BamHI restriction sites in their 5′ and 3′ ends respectively. The linker library is then subcloned in pCLS7183 (SEQ ID NO: 141) via the XmaI and BamHI restriction sites to replace the C-terminal domain of the AvrBs3-derived TALEN (pCLS7184, SEQ ID NO: 196). The AvrBs3-derived set of repeat domains (RVDs) or any other RVD sequences having or lacking the terminal half RVD is cloned in this backbone library. DNA from the library is obtained, after scrapping of the colonies from the Petri dishes, using standard miniprep techniques. The FokI catalytic head is removed using BamHI and EagI restriction enzymes, the remaining backbone being purified using standard gel extraction techniques. DNA coding for ColE7 catalytic domain (SEQ ID NO: 11) was amplified by the PCR to introduce, at the DNA level, a BamHI (at the 5′ of the coding strand) and a EagI (at the 3′ of the coding strand) restriction site and, at the protein level, a linker (for example -SGGSGS- stretch, SEQ ID NO: 219) between the C terminal domain library and the catalytic head. After BamHI and EagI digestion and purification, the DNA coding for the different catalytic heads were individually subcloned into the library scaffold previously prepared.

[0423] DNA from the final library is obtained, after scrapping of the colonies from Petri dishes, using standard miniprep techniques and the resulting libraries are screened in our yeast SSA assay as previously described (International PCT Applications WO 2004/067736 and in Epinat, Arnould et al. 2003; Chames, Epinat et al. 2005; Arnould, Chames et al. 2006; Smith, Grizot et al. 2006) on pseudo palindromic targets in order to compare activity with a standard TALE-AvrBs3::FokI TALEN, which requires two binding sites for activity. AvrBs3 targets contain two identical recognition sequences juxtaposed with the 3′ ends proximal and separated by “spacer” DNA containing 15, 18, 21 and 24 bps (SEQ ID NO: 167, 170, 173 and 176, Table 7). In addition, constructs (SEQ ID NO: 416-419) were tested on a target having only a single AvrBs3 recognition site (SEQ ID NO: 224). Data summarized in FIG. 20 show sequences of the linker of a fraction of ColE7 constructs being active on targets having two AvrBs3 recognition sites or only one AvrBs3 recognition site.

[0424] The U.S. provisional applications to which this application claims priority as well as the corresponding PCT application being filed Apr. 5, 2012 and entitled “METHOD FOR THE GENERATION OF COMPACT TALE-NUCLEASES AND USES THEREOF” are hereby incorporated by reference in their entireties.

### LIST OF CITED REFERENCES

[0425] Arimondo, P. B., C. J. Thomas, et al. (2006). “Exploring the cellular activity of camptothecin-triple-helix-forming oligonucleotide conjugates.” Mol Cell Biol 26(1): 324-33.
[0426] Arnould, S., P. Chames, et al. (2006). Engineering of large numbers of highly specific homing endonucleases that induce recombination on novel DNA targets. Journal of Molecular Biology. 355: 443-58.
[0427] Arnould, S., P. Chames, et al. (2006). “Engineering of large numbers of highly specific homing endonucleases that induce recombination on novel DNA targets.” J Mol Biol 355(3): 443-58.
[0428] Arnould, S., C. Delenda, et al. (2011). “The I-CreI meganuclease and its engineered derivatives: applications from cell modification to gene therapy
[0429] gzq083 [pii] 10.1093/protein/gzq083.” Protein engineering, design & selection: PEDS 24(1-2): 27-31.
[0430] Arnould, S., C. Perez, et al. (2007). “Engineered I-CreI derivatives cleaving sequences from the human XPC gene can induce highly efficient gene correction in mammalian cells.” Journal of Molecular Biology 371(1): 49-65.
[0431] Ashworth, J., J. J. Havranek, et al. (2006). “Computational redesign of endonuclease DNA binding and cleavage specificity.” Nature 441(7093): 656-9.
[0432] Bedayat, B., A. Abdolmohamadi, et al. (2010). “Sequence-specific correction of genomic hypoxanthine-guanine phosphoribosyl transferase mutations in lymphoblasts by small fragment homologous replacement
[0433] 10.1089/oli.2009.0205.” Oligonucleotides 20(1): 7-16.
[0434] Bennardo, N., A. Cheng, et al. (2008). “Alternative-NHEJ is a mechanistically distinct pathway of mammalian chromosome break repair.” PLoS Genet. 4(6): e1000110.
[0435] Bennardo, N., A. Gunn, et al. (2009). “Limiting the persistence of a chromosome break diminishes its mutagenic potential.” PLoS Genet. 5(10): e1000683.
[0436] Boch, J., H. Scholze, et al. (2009). “Breaking the code of DNA binding specificity of TAL-type III effectors.”Science 326(5959): 1509-12.
[0437] Boch, J., H. Scholze, et al. (2009). “Breaking the code of DNA binding specificity of TAL-type III effectors
[0438] 1178811 [pii] 10.1126/science.1178811.” Science 326(5959): 1509-12.
[0439] Bolduc, J. M., P. C. Spiegel, et al. (2003). “Structural and biochemical analyses of DNA and RNA binding by a bifunctional homing endonuclease and group I intron splicing factor.” Genes Dev 17(23): 2875-88.
[0440] Buis, J., Y. Wu, et al. (2008). “Mre11 nuclease activity has essential roles in DNA repair and genomic stability distinct from ATM activation.” Cell 135(1): 85-96.
[0441] Capecchi, M. R. (2001). “Generating mice with targeted mutations
[0442] 10.1038/nm1001-1086 nm1001-1086 [pii].” Nature Medicine 7(10): 1086-90.
[0443] Carroll, D. (2008). “Progress and prospects: zinc-finger nucleases as gene therapy agents
[0444] gt2008145 [pii] 10.1038/gt.2008.145.” Gene therapy 15(22): 1463-8.
[0445] Chames, P., J. C. Epinat, et al. (2005). “In vivo selection of engineered homing endonucleases using double-strand break induced homologous recombination.” Nucleic Acids Res 33(20): e178.
[0446] Chames, P., J. C. Epinat, et al. (2005). “In vivo selection of engineered homing endonucleases using double-strand break induced homologous recombination.” Nucleic Acids Research 33(20): e178.
[0447] Chan, S. H., B. L. Stoddard, et al. (2011). “Natural and engineered nicking endonucleases—from cleavage mechanism to engineering of strand-specificity.” Nucleic Acids Research 39: 1-18.
[0448] Chevalier, B., M. Turmel, et al. (2003). “Flexible DNA target site recognition by divergent homing endonuclease isoschizomers I-CreI and I-Msol.” J Mol Biol 329(2): 253-69.
[0449] Chevalier, B. S., T. Kortemme, et al. (2002). “Design, activity, and structure of a highly specific artificial endonuclease.” Mol Cell 10(4): 895-905.
[0450] Chevalier, B. S., R. J. Monnat, Jr., et al. (2001). “The homing endonuclease I-CreI uses three metals, one of which is shared between the two active sites.” Nat Struct Biol 8(4): 312-6.
[0451] Chevalier, B. S, and B. L. Stoddard (2001). “Homing endonucleases: structural and functional insight into the catalysts of intron/intein mobility.” Nucleic Acids Res 29(18): 3757-74.
[0452] Choo, Y. and A. Klug (1994). “Selection of DNA binding sites for zinc fingers using rationally randomized DNA reveals coded interactions.” Proceedings of the National Academy of Sciences of the United States of America 91(23): 11168-72.
[0453] Choo, Y. and A. Klug (1994). “Toward a code for the interactions of zinc fingers with DNA: selection of randomized fingers displayed on phage.” Proceedings of the National Academy of Sciences of the United States of America 91(23): 11163-7.
[0454] Choulika, A., A. Perrin, et al. (1995). “Induction of homologous recombination in mammalian chromosomes by using the I-SceI system of Saccharomyces cerevisiae.” Mol Cell Biol 15(4): 1968-73.
[0455] Christian, M., T. Cermak, et al. (2010). “Targeting DNA double-strand breaks with TAL effector nucleases.” Genetics 186(2): 757-61.
[0456] Christian, M., T. Cermak, et al. (2010). “Targeting DNA double-strand breaks with TAL effector nucleases genetics. 110.120717 [pii] 10.1534/genetics.110.120717.” Genetics 186(2): 757-61.
[0457] Cost, G. J., Y. Freyvert, et al. (2010). “BAK and BAX deletion using zinc-finger nucleases yields apoptosis-resistant CHO cells
[0458] 10.1002/bit.22541.” Biotechnology and Bioengineering 105(2): 330-40.
[0459] Delacote, F. and B. S. Lopez (2008). “Importance of the cell cycle phase for the choice of the appropriate DSB repair pathway, for genome stability maintenance: the trans-S double-strand break repair model
[0460] 5149 [pii].” Cell Cycle 7(1): 33-8.
[0461] Doudeva, L. G., H. Huang, et al. (2006). “Crystal structural analysis and metal-dependent stability and activity studies of the ColE7 endonuclease domain in complex with DNA/Zn2+or inhibitor/Ni2+15/2/269 [pii] 10.1110/ps. 051903406.” Protein science: a publication of the Protein Society 15(2): 269-80.
[0462] Doyon, J. B., V. Pattanayak, et al. (2006). “Directed evolution and substrate specificity profile of homing endonuclease I-SceI.” Journal of the American Chemical Society 128(7): 2477-84.
[0463] Doyon, J. B., V. Pattanayak, et al. (2006). “Directed evolution and substrate specificity profile of homing endonuclease I-SceI.” J Am Chem Soc 128(7): 2477-84.
[0464] Doyon, Y., J. M. McCammon, et al. (2008). “Heritable targeted gene disruption in zebrafish using designed zinc-finger nucleases
[0465] nbt1409 [pii] 10.1038/nbt1409.” Nature Biotechnology 26(6): 702-8.
[0466] Eastberg, J. H., J. Eklund, et al. (2007). “Mutability of an HNH nuclease imidazole general base and exchange of a deprotonation mechanism.” Biochemistry 46(24): 7215-25.
[0467] Eisenschmidt, K., T. Lanio, et al. (2005). “Developing a programmed restriction endonuclease for highly specific DNA cleavage.” Nucleic Acids Res 33(22): 7039-47.
[0468] Elrod-Erickson, M., M. A. Rould, et al. (1996). “Zif268 protein-DNA complex refined at 1.6 A: a model system for understanding zinc finger-DNA interactions.” Structure 4(10): 1171-80.
[0469] Epinat, J. C., S. Arnould, et al. (2003). “A novel engineered meganuclease induces homologous recombination in yeast and mammalian cells.” Nucleic Acids Research 31(11): 2952-62.
[0470] Epinat, J. C., S. Arnould, et al. (2003). “A novel engineered meganuclease induces homologous recombination in yeast and mammalian cells.” Nucleic Acids Res 31(11): 2952-62.
[0471] Frank, K. M., J. M. Sekiguchi, et al. (1998). “Late embryonic lethality and impaired V(D)J recombination in mice lacking DNA ligase IV
[0472] 10.1038/24172.” Nature 396(6707): 173-7.
[0473] Galetto, R., P. Duchateau, et al. (2009). “Targeted approaches for gene therapy and the emergence of engineered meganucleases
[0474] 10.1517/14712590903213669.” Expert opinion on biological therapy 9(10): 1289-303.
[0475] Gao, H., J. Smith, et al. (2010). “Heritable targeted mutagenesis in maize using a designed endonuclease TP14041 [pii] 10.1111/j.1365-313X.2009.04041.x.” The Plant journal: for cell and molecular biology 61(1): 176-87.
[0476] Gao, Y., Y. Sun, et al. (1998). “A critical role for DNA end-joining proteins in both lymphogenesis and neurogenesis
[0477] S0092-8674(00)81714-6 [pii].” Cell 95(7): 891-902.
[0478] Geurts, A. M., G. J. Cost, et al. (2009). “Knockout rats via embryo microinjection of zinc-finger nucleases 325/5939/433 [pii] 10.1126/science.1172447.” Science 325(5939): 433.
[0479] Gimble, F. S., C. M. Moure, et al. (2003). “Assessing the plasticity of DNA target site recognition of the PI-SceI homing endonuclease using a bacterial two-hybrid selection system.” J Mol Biol 334(5): 993-1008.
[0480] Greisman, H. A. and C. O. Pabo (1997). “A general strategy for selecting high-affinity zinc finger proteins for diverse DNA target sites.” Science 275(5300): 657-61.
[0481] Gruenert, D. C., E. Bruscia, et al. (2003). “Sequence-specific modification of genomic DNA by small DNA fragments
[0482] 10.1172/JCI19773 112/5/637 [pii].” The Journal of clinical investigation 112(5): 637-41.
[0483] Guirouilh-Barbat, J., S. Huck, et al. (2004). “Impact of the KU80 pathway on NHEJ-induced genome rearrangements in mammalian cells.” Mol Cell 14(5): 611-23.
[0484] Guirouilh-Barbat, J., S. Huck, et al. (2004). “Impact of the KU80 pathway on NHEJ-induced genome rearrangements in mammalian cells
[0485] 10.1016/j.molce1.2004.05.008 51097276504002916 [pii].” Molecular Cell 14(5): 611-23.
[0486] Guirouilh-Barbat, J., E. Rass, et al. (2007). “Defects in XRCC4 and KU80 differentially affect the joining of distal nonhomologous ends.” Proc Natl Acad Sci USA 104(52): 20902-7.
[0487] Guirouilh-Barbat, J., E. Rass, et al. (2007). “Defects in XRCC4 and KU80 differentially affect the joining of distal nonhomologous ends
[0488] 0708541104 [pii] 10.1073/pnas.0708541104.” Proceedings of the National Academy of Sciences of the United States of America 104(52): 20902-7.
[0489] Gurlebeck, D., B. Szurek, et al. (2005). “Dimerization of the bacterial effector protein AvrBs3 in the plant cell cytoplasm prior to nuclear import
[0490] TPJ2370 [pii] 10.1111/j.1365-313X.2005.02370.x.” The Plant journal: for cell and molecular biology 42(2): 175-87.
[0491] Haber, J. (2000). “Partners and pathwaysrepairing a double-strand break.” Trends Genet. 16(6): 259-264.
[0492] Haber, J. E. (2008). “Alternative endings
[0493] 0711334105 [pii] 10.1073/pnas.0711334105.” Proceedings of the National Academy of Sciences of the United States of America 105(2): 405-6.
[0494] Hartsuiker, E., K. Mizuno, et al. (2009). “Ctp1CtIP and Rad32Mre11 nuclease activity are required for Rec12Spo11 removal, but Rec12Spo11 removal is dispensable for other MRN-dependent meiotic functions.” Mol Cell Biol 29(7): 1671-81.
[0495] Hinnen, A., J. B. Hicks, et al. (1978). “Transformation of yeast.” Proceedings of the National Academy of Sciences of the United States of America 75(4): 1929-33.
[0496] Hirata, R., J. Chamberlain, et al. (2002). “Targeted transgene insertion into human chromosomes by adeno-associated virus vectors
[0497] 10.1038/nbt0702-735 nbt0702-735 [pii].” Nature Biotechnology 20(7): 735-8.
[0498] Huang, H. and H. S. Yuan (2007). “The conserved asparagine in the HNH motif serves an important structural role in metal finger endonucleases.” Journal of Molecular Biology 368(3): 812-21.
[0499] Ichiyanagi, K., Y. Ishino, et al. (2000). “Crystal structure of an archaeal intein-encoded homing endonuclease PI-Pful.” J Mol Biol 300(4): 889-901.
[0500] Inoue, N., R. Dong, et al. (2001). “Introduction of single base substitutions at homologous chromosomal sequences by adeno-associated virus vectors
[0501] 10.1006/mthe.2001.0283 S1525-0016(01)90283-7 [pii].” Molecular therapy: the journal of the American Society of Gene Therapy 3(4): 526-30.
[0502] Isalan, M. and Y. Choo (2001). “Rapid, high-throughput engineering of sequence-specific zinc finger DNA-binding proteins
[0503] 50076-6879(01)40444-7 [pii].” Methods in Enzymology 340: 593-609.
[0504] Kalish, J. M. and P. M. Glazer (2005). “Targeted genome modification via triple helix formation.” Ann N Y Acad Sci 1058: 151-61.
[0505] Kim, H. J., H. J. Lee, et al. (2009). “Targeted genome editing in human cells with zinc finger nucleases constructed via modular assembly
[0506] gr.089417.108 [pii] 10.1101/gr.089417.108.” Genome Research 19(7): 1279-88.
[0507] Kim, Y. G., J. Cha, et al. (1996). “Hybrid restriction enzymes: zinc finger fusions to Fok I cleavage domain.” Proceedings of the National Academy of Sciences of the United States of America 93(3): 1156-60.
[0508] Ku, W. Y., Y. W. Liu, et al. (2002). “The zinc ion in the HNH motif of the endonuclease domain of colicin E7 is not required for DNA binding but is essential for DNA hydrolysis.” Nucleic Acids Research 30(7): 1670-8.
[0509] Landthaler, M., U. Begley, et al. (2002). “Two self-splicing group I introns in the ribonucleotide reductase large subunit gene of Staphylococcus aureus phage Twort.” Nucleic Acids Research 30(9): 1935-43.
[0510] Landthaler, M., N. C. Lau, et al. (2004). “Group I intron homing in Bacillus phages SPO₁ and SP82: a gene conversion event initiated by a nicking homing endonuclease.” Journal of Bacteriology 186(13): 4307-14.
[0511] Landthaler, M., B. W. Shen, et al. (2006). “I-BasI and I-HmuI: two phage intron-encoded endonucleases with homologous DNA recognition sequences but distinct DNA specificities.” Journal of Molecular Biology 358(4): 1137-51.
[0512] Landthaler, M. and D. A. Shub (2003). “The nicking homing endonuclease I-BasI is encoded by a group I intron in the DNA polymerase gene of the Bacillus thuringiensis phage Bastille.” Nucleic Acids Research 31(12): 3071-7.
[0513] Lee, S. E., F. Paques, et al. (1999). “Role of yeast SIR genes and mating type in directing DNA double-strand breaks to homologous and non-homologous repair paths.” Curr Biol 9(14): 767-70.
[0514] Li, T., S. Huang, et al. (2010). “TAL nucleases (TALNs): hybrid proteins composed of TAL effectors and FokI DNA-cleavage domain.” Nucleic Acids Res 39(1): 359-72.
[0515] Li, T., S. Huang, et al. (2011). “TAL nucleases (TALNs): hybrid proteins composed of TAL effectors and FokI DNA-cleavage domain
[0516] gkq704 [pii] 10.1093/nar/gkq704.” Nucleic Acids Research 39(1): 359-72.
[0517] Liang, F., M. Han, et al. (1998). “Homology-directed repair is a major double-strand break repair pathway in mammalian cells.” Proceedings of the National Academy of Sciences of the United States of America 95(9): 5172-7.
[0518] Liu, P. Q., E. M. Chan, et al. (2010). “Generation of a triple-gene knockout mammalian cell line using engineered zinc-finger nucleases
[0519] 10.1002/bit.22654.” Biotechnology and Bioengineering 106(1): 97-105.
[0520] Liu, Q., J. T. Dansereau, et al. (2008). “Role of the interdomain linker in distance determination for remote cleavage by homing endonuclease I-TevI.” J Mol Biol 379(5): 1094-106.
[0521] Liu, Q., V. Derbyshire, et al. (2006). “Distance determination by GIY-YIG intron endonucleases: discrimination between repression and cleavage functions.” Nucleic Acids Research 34(6): 1755-64.
[0522] Lloyd, A., C. L. Plaisier, et al. (2005). “Targeted mutagenesis using zinc-finger nucleases in Arabidopsis 0409339102 [pii] 10.1073/pnas.0409339102.” Proceedings of the National Academy of Sciences of the United States of America 102(6): 2232-7.
[0523] Maeder, M. L., S. Thibodeau-Beganny, et al. (2008). “Rapid “open-source” engineering of customized zinc-finger nucleases for highly efficient gene modification
[0524] S1097-2765(08)00461-9 [pii] 10.1016/j.molcel.2008.06.016.” Molecular Cell 31(2): 294-301.
[0525] Mahfouz, M. M., L. Li, et al. (2011). “De novo-engineered transcription activator-like effector (TALE) hybrid nuclease with novel DNA binding specificity creates double-strand breaks
[0526] 1019533108 [pii] 10.1073/pnas.1019533108.” Proceedings of the National Academy of Sciences of the United States of America 108(6): 2623-8.
[0527] Marcaida, M. J., I. G. Munoz, et al. (2010). “Homing endonucleases: from basics to therapeutic applications
[0528] 10.1007/s00018-009-0188-y.” Cellular and molecular life sciences: CMLS 67(5): 727-48.
[0529] Mashimo, T., A. Takizawa, et al. (2010). “Generation of knockout rats with X-linked severe combined immunodeficiency (X-SCID) using zinc-finger nucleases
[0530] 10.1371/journal.pone.0008870.” PloS one 5(1): e8870.
[0531] McConnell Smith, A., R. Takeuchi, et al. (2009). “Generation of a nicking enzyme that stimulates site-specific gene conversion from the I-Anil LAGLIDADG homing endonuclease
[0532] 0810588106 [pii] 10.1073/pnas.0810588106.” Proceedings of the National Academy of Sciences of the United States of America 106(13): 5099-104.
[0533] McVey, M. and S. E. Lee (2008). “MMEJ repair of double-strand breaks (director's cut): deleted sequences and alternative endings
[0534] S0168-9525(08)00229-1 [pii] 10.1016/j.tig.2008.08.007.” Trends in genetics: TIG 24(11): 529-38.
[0535] Menoret, S., A. L. Iscache, et al. (2010). “Characterization of immunoglobulin heavy chain knockout rats
[0536] 10.1002/eji.201040939.” European Journal of Immunology 40(10): 2932-41.
[0537] Metzger, M. J., A. McConnell-Smith, et al. (2011). “Single-strand nicks induce homologous recombination with less toxicity than double-strand breaks using an AAV vector template
[0538] gkq826 [pii] 10.1093/nar/gkq826.” Nucleic Acids Research 39(3): 926-35.
[0539] Midon, M., P. Schafer, et al. (2011). “Mutational and biochemical analysis of the DNA-entry nuclease EndA from Streptococcus pneumoniae
[0540] gkq802 [pii] 10.1093/nar/gkq802.” Nucleic Acids Research 39(2): 623-34.
[0541] Miller, J. C., S. Tan, et al. (2011). “A TALE nuclease architecture for efficient genome editing
[0542] nbt.1755 [pii] 10.1038/nbt.1755.” Nature Biotechnology 29(2): 143-8.
[0543] Mimitou, E. P. and L. S. Symington (2008). “Sae2, Exo1 and Sgs1 collaborate in DNA double-strand break processing.” Nature 455(7214): 770-4.
[0544] Moore, I., M. Samalova, et al. (2006). “Transactivated and chemically inducible gene expression in plants.” Plant J 45(4): 651-83.
[0545] Moore, J. K. and J. E. Haber (1996). “Cell cycle and genetic requirements of two pathways of nonhomologous end-joining repair of double-strand breaks in Saccharomyces cerevisiae.” Mol Cell Biol 16(5): 2164-73.
[0546] Moscou, M. J. and A. J. Bogdanove (2009). “A simple cipher governs DNA recognition by TAL effectors.” Science 326(5959): 1501.
[0547] Moscou, M. J. and A. J. Bogdanove (2009). “A simple cipher governs DNA recognition by TAL effectors 1178817 [pii] 10.1126/science.1178817.” Science 326(5959): 1501.
[0548] Moure, C. M., F. S. Gimble, et al. (2002). “Crystal structure of the intein homing endonuclease PI-SceI bound to its recognition sequence.” Nat Struct Biol 9(10): 764-70.
[0549] Moure, C. M., F. S. Gimble, et al. (2003). “The crystal structure of the gene targeting homing endonuclease I-SceI reveals the origins of its target site specificity.” J Mol Biol 334(4): 685-95.
[0550] Nimonkar, A. V., J. Genschel, et al. (2011). “BLM-DNA2-RPA-MRN and EXO1-BLM-RPA-MRN constitute two DNA end resection machineries for human DNA break repair.” Genes Dev 25(4): 350-62.
[0551] Niu, Y., K. Tenney, et al. (2008). “Engineering variants of the I-SceI homing endonuclease with strand-specific and site-specific DNA-nicking activity
[0552] S0022-2836(08)00840-1 [pii] 10.1016/j.jmb.2008.07.010.” Journal of Molecular Biology 382(1): 188-202.
[0553] Orr-Weaver, T. L., J. W. Szostak, et al. (1981). “Yeast transformation: a model system for the study of recombination.” Proceedings of the National Academy of Sciences of the United States of America 78(10): 6354-8.
[0554] Orr-Weaver, T. L., J. W. Szostak, et al. (1983). “Genetic applications of yeast transformation with linear and gapped plasmids.” Methods in Enzymology 101: 228-45.
[0555] Pabo, C. 0., E. Peisach, et al. (2001). “Design and selection of novel Cys2H is2 zinc finger proteins
[0556] 70/1/313 [pii] 10.1146/annurev.biochem. 70.1.313.” Annual Review of Biochemistry 70: 313-40.
[0557] Padidam, M. (2003). “Chemically regulated gene expression in plants.” Curr Opin Plant Biol 6(2): 169-77.
[0558] Paques, F. and P. Duchateau (2007). “Meganucleases and DNA double-strand break-induced recombination: perspectives for gene therapy.” Current Gene Therapy 7(1): 49-66.
[0559] Paques, F. and P. Duchateau (2007). “Meganucleases and DNA double-strand break-induced recombination: perspectives for gene therapy.” Curr Gene Ther 7(1): 49-66.
[0560] Paques, F. and J. E. Haber (1999). “Multiple pathways of recombination induced by double-strand breaks in Saccharomyces cerevisiae.” Microbiology and molecular biology reviews: MMBR 63(2): 349-404.
[0561] Perez, E. E., J. Wang, et al. (2008). “Establishment of HIV-1 resistance in CD4+ T cells by genome editing using zinc-finger nucleases
[0562] nbt1410 [pii] 10.1038/nbt1410.” Nature Biotechnology 26(7): 808-16.
[0563] Pierce, A. J., P. Hu, et al. (2001). “Ku DNA end-binding protein modulates homologous repair of double-strand breaks in mammalian cells.” Genes Dev 15(24): 3237-42.
[0564] Pingoud, A. and G. H. Silva (2007). “Precision genome surgery.” Nat Biotechnol 25(7): 743-4.
[0565] Porteus, M. H. and D. Carroll (2005). “Gene targeting using zinc finger nucleases.” Nat Biotechnol 23(8): 967-73.
[0566] Ramirez, C. L., J. E. Foley, et al. (2008). “Unexpected failure rates for modular assembly of engineered zinc fingers
[0567] nmeth0508-374 [pii] 10.1038/nmeth0508-374.” Nature Methods 5(5): 374-5.
[0568] Rosen, L. E., H. A. Morrison, et al. (2006). “Homing endonuclease I-CreI derivatives with novel DNA target specificities.” Nucleic Acids Research 34(17): 4791-800.
[0569] Rosen, L. E., H. A. Morrison, et al. (2006). “Homing endonuclease I-CreI derivatives with novel DNA target specificities.” Nucleic Acids Res.
[0570] Rothstein, R. J. (1983). “One-step gene disruption in yeast.” Methods in Enzymology 101: 202-11.
[0571] Rouet, P., F. Smih, et al. (1994). “Expression of a site-specific endonuclease stimulates homologous recombination in mammalian cells.” Proc Natl Acad Sci USA 91(13): 6064-8.
[0572] Rouet, P., F. Smih, et al. (1994). “Introduction of double-strand breaks into the genome of mouse cells by expression of a rare-cutting endonuclease.” Mol Cell Biol 14(12): 8096-106.
[0573] Russell, D. W. and R. K. Hirata (1998). “Human gene targeting by viral vectors
[0574] 10.1038/ng0498-325.” Nature Genetics 18(4): 325-30.
[0575] Sangiuolo, F., M. L. Scaldaferri, et al. (2008). “Cftr gene targeting in mouse embryonic stem cells mediated by Small Fragment Homologous Replacement (SFHR) 2904 [pii].” Frontiers in bioscience: a journal and virtual library 13: 2989-99.
[0576] Santiago, Y., E. Chan, et al. (2008). “Targeted gene knockout in mammalian cells by using engineered zinc-finger nucleases
[0577] 0800940105 [pii] 10.1073/pnas.0800940105.” Proceedings of the National Academy of Sciences of the United States of America 105(15): 5809-14.
[0578] Sartori, A. A., C. Lukas, et al. (2007). “Human CtIP promotes DNA end resection.” Nature 450(7169): 509-14.
[0579] Seligman, L. M., K. M. Chisholm, et al. (2002). “Mutations altering the cleavage specificity of a homing endonuclease.” Nucleic Acids Research 30(17): 3870-9.
[0580] Seligman, L. M., K. M. Stephens, et al. (1997). “Genetic analysis of the Chlamydomonas reinhardtii I-CreI mobile intron homing system in Escherichia coli.” Genetics 147(4): 1653-64.
[0581] Shen, B. W., M. Landthaler, et al. (2004). “DNA binding and cleavage by the HNH homing endonuclease I-HmuI.” Journal of Molecular Biology 342(1): 43-56.
[0582] Shukla, V. K., Y. Doyon, et al. (2009). “Precise genome modification in the crop species Zea mays using zinc-finger nucleases
[0583] nature07992 [pii] 10.1038/nature07992.” Nature 459(7245): 437-41.
[0584] Silva, G. H., J. Z. Dalgaard, et al. (1999). “Crystal structure of the thermostable archaeal intron-encoded endonuclease I-DmoI.” J Mol Biol 286(4): 1123-36.
[0585] Simon, P., F. Cannata, et al. (2008). “Sequence-specific DNA cleavage mediated by bipyridine polyamide conjugates.” Nucleic Acids Res 36(11): 3531-8.
[0586] Smith, J., J. M. Berg, et al. (1999). “A detailed study of the substrate specificity of a chimeric restriction enzyme
[0587] gkc139 [pii].” Nucleic Acids Research 27(2): 674-81.
[0588] Smith, J., M. Bibikova, et al. (2000). “Requirements for double-strand cleavage by chimeric restriction enzymes with zinc finger DNA-recognition domains.” Nucleic Acids Research 28(17): 3361-9.
[0589] Smith, J., S. Grizot, et al. (2006). “A combinatorial approach to create artificial homing endonucleases cleaving chosen sequences.” Nucleic Acids Research 34(22): e149.
[0590] Smith, J., S. Grizot, et al. (2006). “A combinatorial approach to create artificial homing endonucleases cleaving chosen sequences.” Nucleic Acids Res 34(22): e149.
[0591] Sonoda, E., H. Hochegger, et al. (2006). “Differential usage of non-homologous end-joining and homologous recombination in double strand break repair.” DNA Repair (Amst) 5(9-10): 1021-9.
[0592] Spiegel, P. C., B. Chevalier, et al. (2006). “The structure of I-CeuI homing endonuclease: Evolving asymmetric DNA recognition from a symmetric protein scaffold.” Structure 14(5): 869-80.
[0593] Stoddard, B. L. (2005). “Homing endonuclease structure and function.” Quarterly Reviews of Biophysics 38(1): 49-95.
[0594] Stoddard, B. L. (2005). “Homing endonuclease structure and function.” Q Rev Biophys 38(1): 49-95.
[0595] Stoddard, B. L., A. M. Scharenberg, et al. (2007). Advances in Engineering Homing Endonucleases for Gene Targeting Ten Years After Structures. Progress in Gene Therapy: Autologous and Cancer Stem Cell Gene Therapy. R. Bertolotti and K. Ozawa, World Scientific Publishing Co. Pte. Ltd. 3: 135-68.
[0596] Sugawara, N. and J. E. Haber (1992). “Characterization of double-strand break-induced recombination: homology requirements and single-stranded DNA formation.” Mol Cell Biol 12(2): 563-75.
[0597] Sun, H., D. Treco, et al. (1991). “Extensive 3′-overhanging, single-stranded DNA associated with the meiosis-specific double-strand breaks at the ARG4 recombination initiation site.” Cell 64(6): 1155-61.
[0598] Sussman, D., M. Chadsey, et al. (2004). “Isolation and characterization of new homing endonuclease specificities at individual target site positions.” Journal of Molecular Biology 342(1): 31-41.
[0599] Sussman, D., M. Chadsey, et al. (2004). “Isolation and characterization of new homing endonuclease specificities at individual target site positions.” J Mol Biol 342(1): 31-41.
[0600] Taubes, G. (2002). “Gene therapy. The strange case of chimeraplasty
[0601] 10.1126/science.298.5601.2116 298/5601/2116 [pii].” Science 298(5601): 2116-20.
[0602] Wang, R., X. Zhou, et al. (2003). “Chemically regulated expression systems and their applications in transgenic plants.” Transgenic Res 12(5): 529-40.
[0603] Wang, Y. T., J. D. Wright, et al. (2009). “Redesign of high-affinity nonspecific nucleases with altered sequence preference
[0604] 10.1021/ja907160r.” Journal of the American Chemical Society 131(47): 17345-53.
[0605] White, C. I. and J. E. Haber (1990). “Intermediates of recombination during mating type switching in Saccharomyces cerevisiae.” Embo J 9(3): 663-73.
[0606] Yang, M., V. Djukanovic, et al. (2009). “Targeted mutagenesis in the progeny of maize transgenic plants
[0607] 10.1007/s11103-009-9499-5.” Plant Molecular Biology 70(6): 669-79.
[0608] Zhao, L., R. P. Bonocora, et al. (2007). “The restriction fold turns to the dark side: a bacterial homing endonuclease with a PD-(D/E)-XK motif.” The EMBO Journal 26(9): 2432-42.
[0609] Zuo, J. and N. H. Chua (2000). “Chemical-inducible systems for regulated expression of plant genes.” Curr Opin Biotechnol 11(2): 146-51.

MEGA

The application's sequence listing, which the Patent Office published only in electronic form, follows.

SEQUENCE LISTING (455 sequences)

SEQ ID NO: 1 - protein, 163 aa, Chlamydomonas reinhardtii
MNTKYNKEFLLYLAGFVDGDGSIIAQIKPNQSYKFKHQLSLTFQVTQKTQRRWFLDKLVDEIGVGYVRDRGSVSDYILSEIKPLHNFLTQLQPFLKLKQKQANLVLKIIEQLPSAKESPDKFLEVCTWVDQIAALNDSKTRKTTSETVRAVLDSLSEKKKSSP

SEQ ID NO: 2 - DNA, 22 bp, Artificial
  C1221 target
caaaacgtcgtacgacgttttg

SEQ ID NO: 3 - DNA, 22 bp, Artificial
  C1234 target
caaaacgtcgtgagacagtttg

SEQ ID NO: 4 - protein, 412 aa, Artificial sequence
  fem-3 gi|262368139|pdb|3K5Q|
SNNVLPTWSLDSNGEMRSRLSLSEVLDSGDLMKFAVDKTGCQFLEKAVKGSLTSYQKFQLFEQVIGRKDDFLKLSTNIFGNYLVQSVIGISLATNDDGYTKRQEKLKNFISSQMTDMCLDKFACRVIQSSLQNMDLSLACKLVQALPRDARLIAICVDQNANHVIQKVVAVIPLKNWEFIVDFVATPEHLRQICSDKYGCRVVQTIIEKLTADSMNVDLTSAAQNLRERALQRLMTSVTNRCQELATNEYANYIIQHIVSNDDLAVYRECIIEKCLMRNLLSLSQEKFASHVVEKAFLHAPLELLAEMMDEIFDGYIPHPDTGKDALDIMMFHQFGNYVVQCMLTICCDAVSGRRQTKEGGYDHAISFQDWLKKLHSRVTKERHRLSRFSSGKKMIETLANLRSTHPIYELQ

SEQ ID NO: 5 - protein, 201 aa, Artificial sequence
  aRep gi|308387836|pdb|3LTJ|
MRGSHHHHHHTDPEKVEMYIKNLQDDSYYVRRAAAYALGKIGDERAVEPLIKALKDEDAWVRRAAADALGQIGDERAVEPLIKALKDEDGWVRQSAAVALGQIGDERAVEPLIKALKDEDWFVRIAAAFALGEIGDERAVEPLIKALKDEDGWVRQSAADALGEIGGERVRAAMEKLAETGTGFARKVAVNYLETHKSLIS

SEQ ID NO: 6 - protein, 309 aa, Pseudomonas Aeruginosa
  Ligd Polymerase Domain gi|109157579|pdb|2FAO|
MGARKASAGASRAATAGVRISHPQRLIDPSIQASKLELAEFHARYADLLLRDLRERPVSLVRGPDGIGGELFFQKHAARLKIPGIVQLDPALDPGHPPLLQIRSAEALVGAVQMGSIEFHTWNASLANLERPDRFVLDLDPDPALPWKRMLEATQLSLTLLDELGLRAFLKTSGGKGMHLLVPLERRHGWDEVKDFAQAISQHLARLMPERFSAVSGPRNRVGKIFVDYLRNSRGASTVAAYSVRAREGLPVSVPVFREELDSLQGANQWNLRSLPQRLDELAGDDPWADYAGTRQRISAAMRRQLGRG

SEQ ID NO: 7 - protein, 303 aa, Mycobacterium Tuberculosis
  Ligase D 2R9L_A GI: 164519498
GSHMGSASEQRVTLTNADKVLYPATGTTKSDIFDYYAGVAEVMLGHIAGRPATRKRWPNGVDQPAFFEKQLALSAPPWLSRATVAHRSGTTTYPIIDSATGLAWIAQQAALEVHVPQWRFVAEPGSGELNPGPATRLVFDLDPGEGVMMAQLAEVARAVRDLLADIGLVTFPVTSGSKGLHLYTPLDEPVSSRGATVLAKRVAQRLEQAMPALVTSTMTKSLRAGKVFVDWSQNSGSKTTIAPYSLRGRTHPTVAAPRTWAELDDPALRQLSYDEVLTRIARDGDLLERLDADAPVADRLTRY

SEQ ID NO: 8 - protein, 410 aa, Pyrococcus Abyssi
  Large Gamma Subunit Of Initiation Factor Eif2 1KJZ_A GI:20664108
GEKRKSRQAEVNIGMVGHVDHGKTTLTKALTGVWTDTHSEELRRGITIKIGFADAEIRRCPNCGRYSTSPVCPYCGHETEFVRRVSFIDAPGHEALMTTMLAGASLMDGAILVIAANEPCPRPQTREHLMALQIIGQKNIIIAQNKIELVDKEKALENYRQIKEFIEGTVAENAPIIPISALHGANIDVLVKAIEDFIPTPKRDPNKPPKMLVLRSFDVNKPGTPPEKLVGGVLDGSIVQGKLKVGDEIEIRPGVPYEEHGRIKYEPITTEIVSLQAGGQFVEEAYPGGLVGVGTKLDPYLTKGDLMAGNVVGKPGKLPPVWDSLRLEVHLLERVVGTEQELKVEPIKRKEVLLLNVGTARTMGLVTGLGKDEIEVKLQIPVCAEPGDRVAISRQIGSRWRLIGYGIIKE

SEQ ID NO: 9 - protein, 419 aa, Artificial sequence
  Translation Initiation Factor Aif2betagamma 2D74_A GI:112490420
MGEKRKTRQAEVNIGMVGHVDHGKTTLTKALTGVWTDTHSEELRRGITIKIGFADAEIRRCSNCGRYSTSPICPYCGHETEFIRRVSFIDSPGHEALMTTMLAGASLMDGAILVIAANEPCPRPQTREHLMALQIIGQKNIIIAQNKIELVDKEKALENYRQIKEFIKGTVAENAPIIPISALHGANIDVLVKAIEEFIPTPKRDSNKPPKMLVLRSFDVNKPGTPPEKLVGGVLDGSIVQGKLKVGDEIEIRPGVPYEEHGRIKYEPITTEIVSLQAGGQFVEEAYPGGLVGIGTKLDPYLTKGDLMAGNVVGKPGKLPPVWTDLRLEVHLLERVVGTEQELNVEPIKRKEVLLLNVGTARTMGLVTALGKDEIELKLQIPVCAEPGERVAISRQIGSRWRLIGYGIIKELEHHHHHH

SEQ ID NO: 10 - protein, 919 aa, Methylophilus methylotrophus
  MmeI ACC85607.1
MALSWNEIRRKAIEFSKRWEDASDENSQAKPFLIDFFEVFGITNKRVATFEHAVKKFAKAHKEQSRGFVDLFWPGILLIEMKSRGKDLDKAYDQALDYFSGIAERDLPRYVLVCDFQRFRLTDLITKESVEFLLKDLYQNVRSFGFIAGYQTQVIKPQDPINIKAAERMGKLHDTLKLVGYEGHALELYLVRLLFCLFAEDTTIFEKSLFQEYIETKTLEDGSDLAHHINTLFYVLNTPEQKRLKNLDEHLAAFPYINGKLFEEPLPPAQFDKAMREALLDLCSLDWSRISPAIFGSLFQSIMDAKKRRNLGAHYTSEANILKLIKPLFLDELWVEFEKVKNNKNKLLAFHKKLRGLTFFDPACGCGNFLVITYRELRLLEIEVLRGLHRGGQQVLDIEHLIQINVDQFFGIEIEEFPAQIAQVALWLTDHQMNMKISDEFGNYFARIPLKSTPHILNANALQIDWNDVLEAKKCCFILGNPPFVGKSKQTPGQKADLLSVFGNLKSASDLDLVAAWYPKAAHYIQTNANIRCAFVSTNSITQGEQVSLLWPLLLSLGIKINFAHRTFSWTNEASGVAAVHCVIIGFGLKDSDEKIIYEYESINGEPLAIKAKNINPYLRDGVDVIACKRQQPISKLPSMRYGNKPTDDGNFLFTDEEKNQFITNEPSSEKYFRRFVGGDEFINNTSRWCLWLDGADISEIRAMPLVLARIKKVQEFRLKSSAKPTRQSASTPMKFFYISQPDTDYLLIPETSSENRQFIPIGFVDRNVISSNATYHIPSAEPLIFGLLSSTMHNCWMRNVGGRLESRYRYSASLVYNTFPWIQPNEKQSKAIEEAAFAILKARSNYPNESLAGLYDPKTMPSELLKAHQKLDKAVDSVYGFKGPNTEIARIAFLFETYQKMTSLLPPEKEIKKSKGKN

SEQ ID NO: 11 - protein, 576 aa, Escherichia coli
  Colicin-E7 (CEA7_ECOLX) Q47112.2
MSGGDGRGHNSGAHNTGGNINGGPTGLGGNGGASDGSGWSSENNPWGGGSGSGVHWGGGSGHGNGGGNSNSGGGSNSSVAAPMAFGFPALAAPGAGTLGISVSGEALSAAIADIFAALKGPFKFSAWGIALYGILPSEIAKDDPNMMSKIVTSLPAETVTNVQVSTLPLDQATVSVTKRVTDVVKDTRQHIAVVAGVPMSVPVVNAKPTRTPGVFHASFPGVPSLTVSTVKGLPVSTTLPRGITEDKGRTAVPAGFTFGGGSHEAVIRFPKESGQKPVYVSVTDVLTPAQVKQRQDEEKRLQQEWNDAHPVEVAERNYEQARAELNQANKDVARNQERQAKAVQVYNSRKSELDAANKTLADAKAEIKQFERFAREPMAAGHRMWQMAGLKAQRAQTDVNNKKAAFDAAAKEKSDADVALSSALERRKQKENKEKDAKAKLDKESKRNKPGKATGKGKPVNNKWLNNAGKDLGSPVPDRIANKLRDKEFKSFDDFRKKFWEEVSKDPELSKQFSRNNNDRMKVGKAPKTRTQDVSGKRTSFELHHEKPISQNGGVYDMDNISVVTPKRHIDIHRGK

SEQ ID NO: 12 - protein, 274 aa, Streptococcus pneumoniae [sequence omitted]

SEQ ID NO: 13 - protein, 235 aa, Escherichia coli
  Endo I (END1_ECOLI) P25736.1
MYRYLSIAAVVLSAAFSGPALAEGINSFSQAKAAAVKVHADAPGTFYCGCKINWQGKKGVVDLQSCGYQVRKNENRASRVEWEHVVPAWQFGHQRQCWQDGGRKNCAKDPVYRKMESDMHNLQPSVGEVNGDRGNFMYSQWNGGEGQYGQCAMKVDFKEKAAEPPARARGAIARTYFYMRDQYNLTLSRQQTQLFNAWNKMYPVTDWECERDERIAKVQGNHNPYVQRACQARKS

SEQ ID NO: 14 - protein, 297 aa, Homo sapiens
  Human Endo G (NUCG_HUMAN) Q14249.4
MRALRAGLTLASGAGLGAVVEGWRRRREDARAAPGLLGRLPVLPVAAAAELPPVPGGPRGPGELAKYGLPGLAQLKSRESYVLCYDPRTRGALWVVEQLRPERLRGDGDRRECDFREDDSVHAYHRATNADYRGSGFDRGHLAAAANHRWSQKAMDDTFYLSNVAPQVPHLNQNAWNNLEKYSRSLTRSYQNVYVCTGPLFLPRTEADGKSYVKYQVIGKNHVAVPTHFFKVLILEAAGGQIELRTYVMPNAPVDEAIPLERFLVPIESIERASGLLFVPNILARAGSLKAITAGSK

SEQ ID NO: 15 - protein, 299 aa, Bos taurus
  Bovine Endo G (NUCG_BOVIN) P38447.1
MQLLRAGLTLALGAGLGAAAESWWRQRADARATPGLLSRLPVLPVAAAAGLPAVPGAPAGGGPGELAKYGLPGVAQLKSRASYVLCYDPRTRGALWVVEQLRPEGLRGDGNRSSCDFHEDDSVHAYHRATNADYRGSGFDRGHLAAAANHRWSQKAMDDTFYLSNVAPQVPHLNQNAWNNLEKYSRSLTRTYQNVYVCTGPLFLPRTEADGKSYVKYQVIGKNHVAVPTHFFKVLILEAAGGQIELRSYVMPNAPVDEAIPLEHFLVPIESIERASGLLFVPNILARAGSLKAITAGSK

SEQ ID NO: 16 - protein, 247 aa, Haemophilus influenzae
  R.HinP1I AAW33811.1
MNLVELGSKTAKDGFKNEKDIADRFENWKENSEAQDWLVTMGHNLDEIKSVKAVVLSGYKSDINVQVLVFYKDALDIHNIQVKLVSNKRGFNQIDKHWLAHYQEMWKFDDNLLRILRHFTGELPPYHSNTKDKRRMFMTEFSQEEQNIVLNWLEKNRVLVLTDILRGRGDFAAEWVLVAQKVSNNARWILRNINEVLQHYGSGDISLSPRGSINFGRVTIQRKGGDNGRETANMLQFKIDPTELFDI

SEQ ID NO: 17 - protein, 188 aa, Bacillus phage Bastille
  I-BasI AAO93095.1
MFQEEWKDVTGFEDYYEVSNKGRVASKRTGVIMAQYKINSGYLCIKFTVNKKRTSHLVHRLVAREFCEGYSPELDVNHKDTDRMNNNYDNLEWLTRADNLKDVRERGKLNTHTAREALAKVSKKAVDVYTKDGSEYIATYPSATEAAEALGVQGAKISTVCHGKRQHTGGYHFKFNSSVDPNRSVSKK

SEQ ID NO: 18 - protein, 266 aa, Bacillus mojavensis
  I-BmoI AAK09365.1
MKSGVYKITNKNTGKFYIGSSEDCESRLKVHFRNLKNNRHINRYLNNSFNKHGEQVFIGEVIHILPIEEAIAKEQWYIDNFYEEMYNISKSAYHGGDLTSYHPDKRNIILKRADSLKKVYLKMTSEEKAKRWQCVQGENNPMFGRKHTETTKLKISNHNKLYYSTHKNPFKGKKHSEESKTKLSEYASQRVGEKNPFYGKTHSDEFKTYMSKKFKGRKPKNSRPVIIDGTEYESATEASRQLNVVPATILHRIKSKNEKYSGYFYK

SEQ ID NO: 19 - protein, 174 aa, Bacillus phage SPO1
  I-HmuI P34081.1
MEWKDIKGYEGHYQVSNTGEVYSIKSGKTLKHQIPKDGYHRIGLFKGGKGKTFQVHRLVAIHFCEGYEEGLVVDHKDGNKDNNLSTNLRWVTQKINVENQMSRGTLNVSKAQQIAKIKNQKPIIVISPDGIEKEYPSTKCACEELGLTRGKVTDVLKGHRIHHKGYTFRYKLNG

SEQ ID NO: 20 - protein, 245 aa, Enterobacteria phage T4
  I-TevI P13299.2
MKSGIYQIKNTLNNKVYVGSAKDFEKRWKRHFKDLEKGCHSSIKLQRSFNKHGNVFECSILEEIPYEKDLIIERENFWIKELNSKINGYNIADATFGDTCSTHPLKEEIIKKRSETVKAKMLKLGPDGRKALYSKPGSKNGRWNPETHKFCKCGVRIQTSAYTCSKCRNRSGENNSFFNHKHSDITKSKISEKMKGKKPSNIKKISCDGVIFDCAADAARHFKISSGLVTYRVKSDKWNWFYINA

SEQ ID NO: 21 - protein, 258 aa, Enterobacteria phage T4
  I-TevII P07072.2
MKWKLRKSLKIANSVAFTYMVRFPDKSFYIGFKKFKTIYGKDTNWKEYNSSSKLVKEKLKDYKAKWIILQVFDSYESALKHEEMLIRKYFNNEFILNKSIGGYKFNKYPDSEEHKQKLSNAHKGKILSLKHKDKIREKLIEHYKNNSRSEAHVKNNIGSRTAKKTVSIALKSGNKFRSFKSAAKFLKCSEEQVSNHPNVIDIKITIHPVPEYVKINDNIYKSFVDAAKDLKLHPSRIKDLCLDDNYPNYIVSYKRVEK

SEQ ID NO: 22 - protein, 269 aa, Enterobacteria phage RB3
  I-TevIII Q38419.1
MNYRKIWIDANGPIPKDSDGRTDEIHHKDGNRENNDLDNLMCLSIQEHYDIHLAQKDYQACHAIKLRMKYSPEEISELASKAAKSREIQIFNIPEVRAKNIASIKSKIENGTFHLLDGEIQRKSNLNRVALGIHNFQQAEHIAKVKERNIAAIKEGTHVFCGGKMQSETQSKRVNDGSHHFLSEDHKKRTSAKTLEMVKNGTHPAQKEITCDFCGHIGKGPGFYLKHNDRCKLNPNRIQLNCPYCDKKDLSPSTYKRWHGDNCKARFND

SEQ ID NO: 23 - protein, 243 aa, Staphylococcus phage Twort
  I-TwoI AAM00817.1
MEELWKEIPGFNSYMISNKGQVYSRKRNKILALRTDKNGYKRISIFNNEGKRILLGVHKLVLLGFKGINTEKPIPHHKNNIKDDNRLENLEWVTVSENTKHAYDIGALKSPRRVTCTLYYKGEPLSCYDSLFDLAKALKVSRSVIESPRNGLVLSTFEVKREPTIQGLPLNKEIFEHSLIKGLGNPPLKVYNEDETYYFLTLMDISKYFNESYSKVQRGYYKGKWKSYIIEHIDFYEYYKQTH

SEQ ID NO: 24 - protein, 262 aa, Moraxella sp.
  R.MspI P11405.1
MRTELLSKLYDDFGIDQLPHTQHGVTSDRLGKLYEKYILDIFKDIESLKKYNTNAFPQEKDISSKLLKALNLDLDNIIDVSSSDTDLGRTIAGGSPKTDATIRFTFHNQSSRLVPLNIKHSSKKKVSIAEYDVETICTGVGISDGELKELIRKHQNDQSAKLFTPVQKQRLTELLEPYRERFIRWCVTLRAEKSEGNILHPDLLIRFQVIDREYVDVTIKNIDDYVSDRIAEGSKARKPGFGTGLNWTYASGSKAKKMQFKG

SEQ ID NO: 25 - protein, 246 aa, Kocuria varians
  R.MvaI
MSEYLNLLKEAIQNVVDGGWHETKRKGNTGIGKTFEDLLEKEEDNLDAPDFHDIEIKTHETAAKSLLTLFTKSPTNPRGANTMLRNRYGKKDEYGNNILHQTVSGNRKTNSNSYNYDFKIDIDWESQVVRLEVFDKQDIMIDNSVYWSFDSLQNQLDKKLKYIAVISAESKIENEKKYYKYNSANLFTDLTVQSLCRGIENGDIKVDIRIGAYHSGKKKGKTHDHGTAFRINMEKLLEYGEVKVIV

SEQ ID NO: 26 - protein, 274 aa, Nostoc sp. PCC 7120
  NucA CAA45962.1
MGICGKLGVAALVALIVGCSPVQSQVPPLTELSPSISVHLLLGNPSGATPTKLTPDNYLMVKNQYALSYNNSKGTANWVAWQLNSSWLGNAERQDNFRPDKTLPAGWVRVTPSMYSGSGYDRGHIAPSADRTKTTEDNAATFLMTNMMPQTPDNNRNTWGNLEDYCRELVSQGKELYIVAGPNGSLGKPLKGKVTVPKSTWKIVVVLDSPGSGLEGITANTRVIAVNIPNDPELNNDWRAYKVSVDELESLTGYDFLSNVSPNIQTSIESKVDN

SEQ ID NO: 27 - protein, 232 aa, Dickeya dadantii 3937
  NucM P37994.2
MLRNLVIFAVLGAGLTTLAAAGQDINNFTQAKAAAAKIHQDAPGTFYCGCKINWQGKKGTPDLASCGYQVRKDANRASRIEWEHVVPAWQFGHQRQCWQDGGRKNCTKDDVYRQIETDLHNLQPAIGEVNGDRGNFMYSQWNGGERQYGQCEMKIDFKSQLAEPPERARGAIARTYFYMRDRYNLNLSRQQTQLFDAWNKQYPATTWECTREKRIAAVQGNHNPYVQQACQP

SEQ ID NO: 28 - protein, 231 aa, Vibrio vulnificus
  Vvn AAF19759.1
MKRLFIFIASFTAFAIQAAPPSSFSAAKQQAVKIYQDHPISFYCGCDIEWQGKKGIPNLETCGYQVRKQQTRASRIEWEHVVPAWQFGHHRQCWQKGGRKNCSKNDQQFRLMEADLHNLTPAIGEVNGDRSNFNFSQWNGVDGVSYGRCEMQVNFKQRKVMPQTELRGSIARTYLYMSQEYGFQLSKQQQQLMQAWNKSYPVDEWECTRDDRIAKIQGNHNPFVQQSCQTQ

SEQ ID NO: 29 - protein, 222 aa, Artificial sequence
  Vvn_CLS
MASGAPPSSFSAAKQQAVKIYQDHPISFYCGCDIEWQGKKGIPNLETCGYQVRKQQTRASRIEWEHVVPAWQFGHHRQCWQKGGRKNCSKNDQQFRLMEADLHNLTPAIGEVNGDRSNFNFSQWNGVDGVSYGRCEMQVNFKQRKVMPPDRARGSIARTYLYMSQEYGFQLSKQQQQLMQAWNKSYPVDEWECTRDDRIAKIQGNHNPFVQQSCQTQGSSAD

SEQ ID NO: 30 - protein, 231 aa, Staphylococcus aureus
  Staphylococcal nuclease (NUC_STAAU) P00644.1
MLVMTEYLLSAGICMAIVSILLIGMAISNVSKGQYAKRFFFFATSCLVLTLVVVSSLSSSANASQTDNGVNRSGSEDPTVYSATSTKKLHKEPATLIKAIDGDTVKLMYKGQPMTFRLLLVDTPETKHPKKGVEKYGPEASAFTKKMVENAKKIEVEFDKGQRTDKYGRGLAYIYADGKMVNEALVRQGLAKVAYVYKPNNTHEQHLRKSEAQAKKEKLNIWSEDNADSGQ

SEQ ID NO: 31 - protein, 169 aa, Staphylococcus hyicus
  Staphylococcal nuclease (NUC_STAHY) P43270.1
MKKITTGLIIVVAAIIVLSIQFMTESGPFKSAGLSNANEQTYKVIRVIDGDTIIVDKDGKQQNLRMIGVDTPETVKPNTPVQPYGKEASDFTKRHLTNQKVRLEYDKQEKDRYGRTLAYVWLGKEMFNEKLAKEGLARAKFYRPNYKYQERIEQAQKQAQKLKKNIWSN

SEQ ID NO: 32 - protein, 174 aa, Shigella flexneri
  Micrococcal nuclease (NUC_SHIFL) P29769.1
MKSALAALRAVAAAVVLIVSVPAWADFRGEVVRILDGDTIDVLVNRQTIRVRLADIDAPESGQAFGSRARQRLADLTFRQEVQVTEKEVDRYGRTLGVVYAPLQYPGGQTQLTNINAIMVQEGMAWAYRYYGKPTDAQMYEYEKEARRQRLGLWSDPNAQEPWKWRRASKNATN

SEQ ID NO: 33 - protein, 211 aa, Bacillus subtilis
  Endonuclease yncB P94492.1
MKKILISMIAIVLSITLAACGSNHAAKNHSDSNGTEQVSQDTHSNEYNQTEQKAGTPHSKNQKKLVNVTLDRAIDGDTIKVIYNGKKDTVRYLLVDTPETKKPNSCVQPYGEDASKRNKELVNSGKLQLEFDKGDRRDKYGRLLAYVYVDGKSVQETLLKEGLARVAYVYEPNTKYIDQFRLDEQEAKSDKLSIWSKSGYVTNRGFNGCVK

SEQ ID NO: 34 - protein, 149 aa, Enterobacteria phage T7
  Endodeoxyribonuclease I (ENRN_BPT7) P00641.1
MAGYGAKGIRKVGAFRSGLEDKVSKQLESKGIKFEYEEWKVPYVIPASNHTYTPDFLLPNGIFVETKGLWESDDRKKHLLIREQHPELDIRIVFSSSRTKLYKGSPTSYGEFCEKHGIKFADKLIPAEWIKEPKKEVPFDRLKRKGGKK

SEQ ID NO: 35 - protein, 671 aa, Homo sapiens
  Metnase Q53H47.1
MAEFKEKPEAPTEQLDVACGQENLPVGAWPPGAAPAPFQYTPDHVVGPGADIDPTQITFPGCICVKTPCLPGTCSCLRHGENYDDNSCLRDIGSGGKYAEPVFECNVLCRCSDHCRNRVVQKGLQFHFQVFKTHKKGWGLRTLEFIPKGRFVCEYAGEVLGFSEVQRRIHLQTKSDSNYIIAIREHVYNGQVMETFVDPTYIGNIGRFLNHSCEPNLLMIPVRIDSMVPKLALFAAKDIVPEEELSYDYSGRYLNLTVSEDKERLDHGKLRKPCYCGAKSCTAFLPFDSSLYCPVEKSNISCGNEKEPSMCGSAPSVFPSCKRLTLETMKMMLDKKQIRAIFLFEFKMGRKAAETTRNINNAFGPGTANERTVQWWFKKFCKGDESLEDEERSGRPSEVDNDQLRAIIEADPLTTTREVAEELNVNHSTVVRHLKQIGKVKKLDKWVPHELTENQKNRRFEVSSSLILRNHNEPFLDRIVTCDEKWILYDNRRRSAQWLDQEEAPKHFPKPILHPKKVMVTIWWSAAGLIHYSFLNPGETITSEKYAQEIDEMNQKLQRLQLALVNRKGPILLHDNARPHVAQPTLQKLNELGYEVLPHPPYSPDLLPTNYHVFKHLNNFLQGKRFHNQQDAENAFQEFVESQSTDFYATGINQLISRWQKCVDCNGSYFD

SEQ ID NO: 36 - protein, 488 aa, Geobacillus stearothermophilus
  Nb.BsrDI ABD15132.1
MTEYDLHLYADSFHEGHWCCENLAKIAQSDGGKHQIDYLQGFIPRHSLIFSDLIINITVFGSYKSWKHLPKQIKDLLFWGKPDFIAYDPKNDKILFAVEETGAVPTGNQALQRCERIYGSARKQIPFWYLLSEFGQHKDGGTRRDSIWPTIMGLKLTQLVKTPSIILHYSDINNPEDYNSGNGLKFLFKSLLQIIINYCTLKNPLKGMLELLSIQYENMLEFIKSQWKEQIDFLPGEEILNTKTKELARMYASLAIGQTVKIPEELFNWPRTDKVNFKSPQGLIKYDELCYQLEKAVGSKKAYCLSNNAGAKPQKLESLKEWINSQKKLFDKAPKLTPPAEFNMKLDAFPVTSNNNYYVTTSKNILYLFDYWKDLRIAIETAFPRLKGKLPTDIDEKPALIYICNSVKPGRLFGDPFTGQLSAFSTIFGKKNIDMPRIVVAYYPHQIYSQALPKNNKSNKGITLKKELTDFLIFHGGVVVKLNEGKAY

SEQ ID NO: 37 - protein, 217 aa, Geobacillus stearothermophilus
  BsrDI A ABD15133.1
MTDYRYSFELSEEIARWAFEIKTKNTDWFVAFSNPTAGPWKRVMAIDKASNREGEVHRFGREDERPDIILVNDNISLILILEAKEKLNQLISKSQVDKSVDVFLTLSSILKEKSDNNYWGDRTKYINVLGILWGSEQETSQKDIDNAFRVYRDSLVKNLKEINPTPTNICTDILVGVESIKNKKEEISIKIHVSNIYAEIYPKFTGKHLLEKLAVLN

SEQ ID NO: 38 - protein, 604 aa, Bacillus sp. D6
  Nt.BspD6I ABN42182.1 (R.BspD6I large subunit)
MAKKVNWYVSCSPRSPEKIQPELKVLANFEGSYWKGVKGYKAQEAFAKELAALPQFLGTTYKKEAAFSTRDRVAPMKTYGFVFVDEEGYLRITEAGKMLANNRRPKDVFLKQLVKWQYPSFQHKGKEYPEEEWSINPLVFVLSLLKKVGGLSKLDIAMFCLTATNNNQVDEIAEEIMQFRNEREKIKGQNKKLEFTENYFFKRFEKIYGNVGKIREGKSDSSHKSKIETKMRNARDVADATTRYFRYTGLFVARGNQLVLNPEKSDLIDEIISSSKVVKNYTRVEEFHEYYGNPSLPQFSFETKEQLLDLAHRIRDENTRLAEQLVEHFPNVKVEIQVLEDIYNSLNKKVDVETLKDVIYHAKELQLELKKKKLQADFNDPRQLEEVIDLLEVYHEKKNVIEEKIKARFIANKNTVFEWLTWNGFIILGNALEYKNNFVIDEELQPVTHAAGNQPDMEIIYEDFIVLGEVTTSKGATQFKMESEPVTRHYLNKKKELEKQGVEKELYCLFIAPEINKNTFEEFMKYNIVQNTRIIPLSLKQFNMLLMVQKKLIEKGRRLSSYDIKNLMVSLYRTTIECERKYTQIKAGLEETLNNWVVDKEVRF

SEQ ID NO: 39 - protein, 186 aa, Bacillus sp. D6
  ss.BspD6I (R.BspD6I small subunit)
MQDILDFYEEVEKTINPPNYFEWNTYRVFKKLGSYKNLVPNFKLDDSGHPIGNAIPGVEDILVEYEHFSILIECSLTIGEKQLDYEGDSVVRHLQEYKKKGIEAYTLFLGKSIDLSFARHIGFNKESEPVIPLTVDQFKKLVTQLKGDGEHFNPNKLKEILIKLLRSDLGYDQAEEWLTFIEYNLK

SEQ ID NO: 40 - protein, 555 aa, Paucimonas lemoignei
  R.PleI AAK27215.1
MAKPIDSKVLFITTSPRTPEKMVPEIELLDKNFNGDVWNKDTQTAFMKILKEESFFDGEGKNDPAFSARDRINRAPKSLGFVILTPKLSLTDAGVELIKAKRKDDIFLRQMLKFQLPSPYHKLSDKAALFYVKPYLEIFRLVRHFGSLTFDELMIFGLQIIDFRIFNQIVDKIEDFRVGKIENKGRYKTYKKERFEEELGKIYKDELFGLTEASAKTLITKKGNNMRDYADACVRYLRATGMVNVSYQGKSLSIVQEKKEEVDFFLKNTEREPCFINDEASYVSYLGNPNYPKLFVDDVDRIKKKLRFDFKKTNKVNALTLPELKEELENEILSRKENILKSQISDIKNFKLYEDIQEVFEKIENDRTLSDAPLMLEWNTWRAMTMLDGGEIKANLKFDDFGSPMSTAIGNMPDIVCEYDDFQLSVEVTMASGQKQYEMEGEPVSRHLGKLKKSSEKPVYCLFIAPKINPSSVAHFFMSHKVDIEYYGGKSLIIPLELSVFRKMIEDTFKASYIPKSDNVHKLFKNFASIADEAGNEKVWYEGVKRTAMNWLSLS

SEQ ID NO: 41 - protein, 556 aa, Micrococcus lylae
  MlyI AAK39546.1
MASLSKTKHLFGFTSPRTIEKIIPELDILSQQFSGKVWGENQINFFDAIFNSDFYEGTTYPQDPALAARDRITRAPKALGFIQLKPVIQLTKAGNQLVNQKRLPELFTKQLLKFQLPSPYHTQSPTVNFNVRPYLELLRLINELGSISKTEIALFFLQLVNYNKFDEIKNKILKFRETRKNNRSVSWKTYVSQEFEKQISIIFADEVTAKNFRTRESSDESFKKFVKTKEGNMKDYADAFFRYIRGTQLVTIDKNLHLKISSLKQDSVDFLLKNTDRNALNLSLMEYENYLFDPDQLIVLEDNSGLINSKIKQLDDSINVESLKIDDAKDLLNDLEIQRKAKTIEDTVNHLKLRSDIEDILDVFAKIKKRDVPDVPLFLEWNIWRAFAALNHTQAIEGNFIVDLDGMPLNTAPGKKPDIEINYGSFSCIVEVTMSSGETQFNMEGSSVPRHYGDLVRKVDHDAYCIFIAPKVAPGTKAHFFNLNRLSTKHYGGKTKIIPMSLDDFICFLQVGITHNFQDINKLKNWLDNLINFNLESEDEEIWFEEIISKISTWAI

SEQ ID NO: 42 - protein, 543 aa, Geobacillus sp. Y412MC52
  AlwI YP_004134094.1
MNKKNTRKVWFITRPERDPRFHQEALLALQKATDDFRLKWAGNREVHKRYEEELANMGIKRNNVSHDGSGGRTWMAMLKTFSYCYVDDDGYIRLTKVGEKLIQGEKVYENTRKQVLTLQYPNAYFLEPGFRPKFDEGFRIRPVLFLIKLANDERLDFYVTKEEITYFAMTAQKDSQLDEIVHKILAFRKAGPREREEMKQDIAAKFDHRERSDKGARDFYEAHSDVAHTFMLISDYTGLVEYIRGKALKGDSSKINEIKQEIAEIEKRYPFNTRYMISLERMAENSGLDVDSYKASRYGNIKPAANSSKLRAKAERILAQFPSIESMSKEEIAGALQKYLSPRDIEKVIHEIVENKDDFEGINSDFVETYLNEKDNLAFEDKTGQIFSALGFDVAMRPKAKNGERTEIEIIARYGGSKFGIIDAKNYAGKFPLSSSLVSHMASEYIPNYTGYEGKELTFFGYVTANDFSGERNLEKISDKAKRITGNPISGFLVTARTLLGFLDYCIENDVPLEDRAELFVKAVKNKGYKSLEALLRELKETI

SEQ ID NO: 43 - protein, 685 aa, Kocuria varians
  Mva1269I AAY97906.1
MYLNTAVFNIYGDNIVECSRAFHYILEGFKLANISITQEYDLQNITTPKFCIYTDKFRYIFIFIPGTSASRWNKDIYKELVLNNGGPLKEGADAIITRIFSEDSELVLASMEFSAALPAGNNTWQRSGRAYSLTAANIPYFYIVQLGGKEIKKGKDGKSDKFATRLPNPALSLSFTLNTIKKPAPSLIVYDQAPEADSAISDLYSNCYGIDDFSLYLFKLITEENNLHELKNIYNKNVEFLQLRSVDEKGKNFSGKDYKYIFEHKDPYKGLTEVVKERKIPWKKKTATKTFENFPLRNQAPIFRLIDFLSTKSYGIVSKDSLPLTFIPSEHRVEVANYICNQLYIDKVSDEFVKWIYKKEDLAICIINGFKPGGDDSRPDRGLPPFTKMLTNLDILTLMFGPAPPTQWDYLDSDPEKLNKTNGLWQSIFAFSDAILVDSSTRDNNKFVYNAYLKEHWVVQREKKESNTPISYFPKSVGEHDVDTSLHILFTYIGKHFESACNPPGGDWSGVSLLKNNIEYRWTSMYRVSQDGTKRPDHIYQLVYNSTDTLLLIESKGIKNDLLKSKEANVGIGMINYLKNLMARDYTAVKKDGEWKNIHGQMTLDKFLTFSAVAYLFTTDFDNEYTSAAELLVHSNTQLAFALEIKEKNSVMHIFTANTVAYNFAEYLLETMRNSHLPLKIYKPI

SEQ ID NO: 44 - protein, 599 aa, Geobacillus stearothermophilus
  BsrI ADR72996.1
MRNIRIYSEVKEQGIFFKEVIQSVLEKANVEVVLVNSAMLDYSDVSVISLIRNQKKFDLLVSEVRDKREIPIVMVEFSTAVTTDDHELQRADAMFWAYKYKIPYLKISPMEKKSQTADDKFGGGRLLSVNDQIIHMYRTDGVMYHIEWESMDNSAYVKNAELYPSCPDCAPELASLFRCLLETIEKCENIEDYYRILLDKLGKQKVAVKWGNFREEKTLEQWKHEKFDLLERFSKSSSRMEYDKDKKELKIKVNRYGHAMDPERGILAFWKLVLGDEWKIVAEFQLQRKTLKGRQSYQSLFDEVSQEEKLMNIASEIIKNGNVISPDKAIEIHKLATSSTMISTIDLGTPERKYITDDSLKGYLQHGLITNIYKNLLYYVDEIRFTDLQRKTIASLTWNKEIVNDYYKSLMDQLLDKNLRVLPLTSIKNISEDLITWSSKEILINLGYKILAASYPEAQGDRCILVGPTGKKTERKFIDLIAISPKSKGVILLECKDKLSKSKDDCEKMNDLLNHNYDKVTKLINVLNINNYNYNNIIYTGVAGLIGRKNVDNLPVDFVIKFKYDAKNLKLNWEINSDILGKHSGSFSMEDVAVVRKRS

SEQ ID NO: 45 - protein, 676 aa, Geobacillus stearothermophilus
  BsmI AAL86024.1
MNVFRIHGDNIIECERVIDLILSKINPQKVKRGFISLSCPFIEIIFKEGHDYFHWRFDMFPGFNKNTNDRWNSNILDLLSQKGSFLYETPDVIITSLNNGKEEILMAIEFCSALQAGNQAWQRSGRAYSVGRTGYPYIYIVDFVKYELNNSDRSRKNLRFPNPAIPYSYISHSKNTGNFIVQAYFRGEEYQPKYDKKLKFFDETIFAEDDIADYIIAKLQHRDTSNIEQLLINKNLKMVEFLSKNTKNDNNFTYSEWESIYNGTYRITNLPSLGRFKFRKKIAEKSLSGKVKEFNNIVQRYSVGLASSDLPFGVIRKESRNDFINDVCKLYNINDMKIIKELKEDADLIVCMLKGFKPRGDDNRPDRGALPLVAMLAGENAQIFTFIYGPLIKGAINLIDQDINKLAKRNGLWKSFVSLSDFIVLDCPIIGESYNEFRLIINKNNKESILRKTSKQQNILVDPTPNHYQENDVDTVIYSIFKYIVPNCFSGMCNPPGGDWSGLSIIRNGHEFRWLSLPRVSENGKRPDHVIQILDLFEKPLLLSIESKEKPNDLEPKIGVQLIKYIEYLFDFTPSVQRKIAGGNWEFGNKSLVPNDFILLSAGAFIDYDNLTENDYEKIFEVTGCDLLIAIKNQNNPQKWVIKFKPKNTIAEKLVNYIKLNFKSNIFDTGFFHIEG

SEQ ID NO: 46 - protein, 465 aa, Artificial sequence
  Nb.BtsCI ADI24225.1
MKRILYLLTEERPKINIIHQIINLEYKATLHFGAKIVPVMNEENKFTFIYHVKGIEVEGFDAVLIKIVSGHSSFVDYLVFDSNDLKPEKNTITLFDLDQYELDLSYYFGKGWIVRIPSPSDLPKYVVEETKTDDHESRNTNAYQRSSKFVFCELYYGKEVKKYMLYDISDGRTLSGTDTHNFGMRMLVTNNVNLVGVPNMYLPFTDIKEFINEKNRIADNGPSHNVPIRLKLDKEKNVIYISAKLDKGNGKNKNKISNDPNIGAVAIISATLRNLNWKGDIEIINHNLLPSSISSRSNGNKLLYIMKKLGVRFNNINVNWNNIKNNINYFFYNITSEKIVSIYYHLYVEDKLSNARVIFDNHAGCGKSYFRTLNNKIIPVGKEIPLPALVIFDSDQNIVKVIAAAKAENVYNGVEQLSTFDKFIESYINKYYPGAAVECSVITWGKSSNPYVSFYLDKDGSAVFL

SEQ ID NO: 47 - protein, 465 aa, Artificial sequence
  Nt.BtsCI ADI24224.1
MKRILYLLTEERPKINIIHQIINLEYKATLHFGAKIVPVMNEENKFTFIYHVKGIEVEGFDAVLIKIVSGHSSFVDYLVFDSNDLKPEKNTITLFDLDQYELDLSYYFGKGWIVRIPSPSDLPKYVVFETKTDDHESRNTNAYQRSSKFVFCELYYGKEVKKYMLYDISDGRTLSGTDTHNFGMRMLVTNNVNLVGVPNMYLPFTDIKEFINEKNRIADNGPSHNVPIRLKLDKEKNVIYISAKLDKGNGKNKNKISNDPNIGAVAIISATLRNLNWKGDIEIINHNLLPSSISSRSNGNKLLYIMKKLGVRFNNINVNWNNIKNNINYFFYNITSEKIVSIYYHLYVEDKLSNARVIFDNHAGCGKSYFRTLNNKIIPVGKEIPLPDLVIFDSDQNIVKVIEAEKAENVYNGVEQLSTFDKFIESYINKYYPGAAVECSVITWGKSSNPYVSFYLDKDGSAVFL

SEQ ID NO: 48 - protein, 164 aa, Geobacillus thermoglucosidasius
  R1.BtsI ABC75874.1
MKITEGIVHVAMRHFLKSNGWKLIAGQYPGGSDDELTALNIVDPVVARDNSPDPRRHSLGKIVPDLIAYKNDDLLVIEAKPKYSQDDRDKLLYLLSERKHDFYAALEKFATERNHPELLPVSKLNIIPGLAFSASENKFKKDPGFVYIRVSGIFEAFMEGYDWG

SEQ ID NO: 49 - protein, 328 aa, Geobacillus thermoglucosidasius
  R2.BtsI ABC75876.1
MQIEQLMKSLTIYFDDIQEGLWFKNLHPLLESASLEAITGSLKRNPNLADVLKYDRPDIILTLNQTPILVIERTIEVPSGHNVGQRYGRLAAASEAGVPLVYFGPYAARKHGGATEGPRYMNLRLFYALDVMQKVNGSAITTINWPVDQNFEILQDPSKDKRMKEYLEMFFDNLLKYGIAGINLAIRNSSFQAEQLAEREKFVETMITNPEQYDVPPDSVQILNAERFFNELGISENKRIICDEVVLYQVGMTYVRSDPYTGMALLYKYLYILGSERNRCLILKFPNITTDMWKKVAFGSRERKDVRIYRSVSDGILFADGYLSKEEL

SEQ ID NO: 50 - protein, 275 aa, Brevibacillus brevis
  BbvCI subunit 1 AAX14652.1
MINEDFFIYEQLSHKKNLEQKGKNAFDEETEELVRQAKSGYHAFIEGINYDEVTKLDLNSSVAALEDYISIAKEIEKKHKMFNWRSDYAGSIIPEFLYRIVHVATVKAGLKPIFSTRNTIIEISGAAHREGLQIRRKNEDFALGFHEVDVKIASESHRVISLAVACEVKTNIDKNKLNGLDFSAERMKRTYPGSAYFLITETLDFSPDENHSSGLIDEIYVLRKQVRTKNRVQKAPLCPSVFAELLEDILEISYRASNVKGHVYDRLEGGKLIRV

SEQ ID NO: 51 - protein, 285 aa, Brevibacillus brevis
  BbvCI subunit 2 AAX14653.1
MFNQFNPLVYTHGGKLERKSKKDKTASKVFEEFGVMEAYNCWKEASLCIQQRDKDSVLKLVAALNTYKDAVEPIFDSRLNSAQEVLQPSILEEFFEYLFSRIDSIVGVNIPIRHPAKGYLSLSFNPHNIETLIQSPEYTVRAKDHDFIIGGSAKLTIQGHGGEGETTNIVVPAVAIECKRYLERNMLDECAGTAERLKRATPYCLYFVVAEYLKLDDGAPELTEIDEIYILRHQRNSERNKPGFKPNPIDGELIWDLYQEVMNHLGKIWWDPNSALQRGKVFNRP

SEQ ID NO: 52 - protein, 294 aa, Bacillus pumilus
  Bpu10I alpha subunit CAA74998.1
MGVEQEWIKNITDMYQSPELIPSHASNLLHQLKREKRNEKLKKALEIITPNYISYISILLNNHNMTRKEIVILVDALNEYMNTLRHPSVKSVFSHQADFYSSVLPEFFNLLFRNLIKGLNEKIKVNSQKDIIIDCIFDPYNEGRVVFKKKRVDVAIILKNKFVFNNVEISDFAIPLVAIEIKTNLDKNMLSGIEQSVDSLKETFPLCLYYCITELADFAIEKQNYASTHIDEVFILRKQKRGPVRRGTPLEVVHADLILEVVEQVGEHLSKFKDPIKTLKARMTEGYLIKGKGK

SEQ ID NO: 53 - protein, 288 aa, Bacillus pumilus
  Bpu10I beta subunit CAA74999.1
MTQIDLSNTKHGSILFEKQKNVKEKYLQQAYKHYLYFRRSIDGLEITNDEAIFKLTQAANNYRDNVLYLFESRPNSGQEAFRYTILEEFFYHLFKDLVKKKFNQEPSSIVMGKANSYVSLSFSPESFLGLYENPIPYIHTKDQDFVLGCAVDLKISPKNELNKENETEIVVPVIAIECKTYIERNMLDSCAATASRLKAAMPYCLYIVASEYMKMDQAYPELTDIDEVFILCKASVGERTALKKKGLPPHKLDENLMVELFHMVERHLNRVWWSPNEALSRGRVIGRP

SEQ ID NO: 54 - protein, 358 aa, Bacillus megaterium
  BmrI ABM69266.1
MNYFSLHPNVYATGRPKGLINMLESVWISNQKPGDGTMYLISGFANYNGGIRFYETFTEHINHGGKVIAILGGSTSQRLSSKQVVAELVSRGVDVYIINRKRLLHAKLYGSSSNSGESLVVSSGNFTGPGMSQNVEASLLLDNNTTSSMGFSWNGMVNSMLDQKWQIHNLSNSNPTSPSWNLLYDERTTNLTLDDTQKVTLILTLGHADTARIQAAPKSKAGEGSQYFWLSKDSYDFFPPLTIRNKRGTKATYSCLINMNYLDIKYIDSECRVTFEAENNFDFRLGTGKLRYTNVAASDDIAAITRVGDSDYELRIIKKGSSNYDALDSAAVNFIGNRGKRYGYIPNDEFGRIIGAKF

SEQ ID NO: 55 - protein, 358 aa, Bacillus firmus
  BfiI CAC12783.1
MNFFSLHPNVYATGRPKGLIGMLENVWVSNHTPGEGTLYLISGFSNYNGGVRFYETFTEHINQGGRVIAILGGSTSQRLSSRQVVEELLNRGVEVHIINRKRILHAKLYGTSNNLGESLVVSSGNFTGPGMSQNIEASLLLDNNTTQSMGFSWNDMISEMLNQNWHIHNMTNATDASPGWNLLYDERTTNLTLDETERVTLIVTLGHADTARIQAAPGTTAGQGTQYFWLSKDSYDFFPPLTIRNRRGTKATYSSLINMNYIDINYTDTQCRVTFEAENNFDFRLGTGKLRYTGVAKSNDIAAITRVGDSDYELRIIKQGTPEHSQLDPYAVSFIGNRGKRFGYISNEEFGRIIGVTF

SEQ ID NO: 56 - protein, 846 aa, Homo sapiens
  hExoI (EXO1_HUMAN)  Q9UQ84.2
MGIQGLLQFIKEASEPIHVRKYKGQVVAVDTYCWLHKGAIACAEKLAKGEPTDRYVGFCMKFVNMLLSHGIKPILVFDGCTLPSKKEVERSRRERRQANLLKGKQLLREGKVSEARECFTRSINITHAMAHKVIKAARSQGVDCLVAPYEADAQLAYLNKAGIVQAIITEDSDLLAFGCKKVILKMDQFGNGLEIDQARLGMCRQLGDVFTEEKFRYMCILSGCDYLSSLRGIGLAKACKVLRLANNPDIVKVIKKIGHYLKMNITVPEDYINGFIRANNTFLYQLVFDPIKRKLIPLNAYEDDVDPETLSYAGQYVDDSIALQIALGNKDINTFEQIDDYNPDTAMPAHSRSHSWDDKTCQKSANVSSIWHRNYSPRPESGTVSDAPQLKENPSTVGVERVISTKGLNLPRKSSIVKRPRSAELSEDDLLSQYSLSFTKKTKKNSSEGNKSLSFSEVFVPDLVNGPTNKKSVSTPPRTRNKFATFLQRKNEESGAVVVPGTRSRFFCSSDSTDCVSNKVSIQPLDETAVTDKENNLHESEYGDQEGKRLVDTDVARNSSDDIPNNHIPGDHIPDKATVFTDEESYSFESSKFTRTISPPTLGTLRSCFSWSGGLGDFSRTPSPSPSTALQQFRRKSDSPTSLPENNMSDVSQLKSEESSDDESHPLREEACSSQSQESGEFSLQSSNASKLSQCSSKDSDSEESDCNIKLLDSQSDQTSKLRLSHFSKKDTPLRNKVPGLYKSSSADSLSTTKIKPLGPARASGLSKKPASIQKRKHHNAENKPGLQIKLNELWKNFGFKKDSEKLPPCKKPLSPVRDNIQLTPEAEEDIFNKPECGRVQRAIFQ

SEQ ID NO: 57 - protein, 702 aa, Saccharomyces cerevisiae
  Yeast ExoI (EXO1_YEAST) P39875.2
MGIQGLLPQLKPIQNPVSLRRYEGEVLAIDGYAWLHRAACSCAYELAMGKPTDKYLQFFIKRFSLLKTFKVEPYLVFDGDAIPVKKSTESKRRDKRKENKAIAERLWACGEKKNAMDYFQKCVDITPEMAKCIICYCKLNGIRYIVAPFEADSQMVYLEQKNIVQGIISEDSDLLVFGCRRLITKLNDYGECLEICRDNFIKLPKKFPLGSLTNEEIITMVCLSGCDYTNGIPKVGLITAMKLVRRFNTIERIILSIQREGKLMIPDTYINEYEAAVLAFQFQRVFCPIRKKIVSLNEIPLYLKDTESKRKRLYACIGFVIHRETQKKQIVHFDDDIDHHLHLKIAQGDLNPYDFHQPLANREHKLQLASKSNIEFGKTNTTNSEAKVKPIESFFQKMTKLDHNPKVANNIHSLRQAEDKLTMAIKRRKLSNANVVQETLKDTRSKFFNKPSMTVVENFKEKGDSIQDFKEDTNSQSLEEPVSESQLSTQIPSSFITTNLEDDDNLSEEVSEVVSDIEEDRKNSEGKTIGNEIYNTDDDGDGDTSEDYSETAESRVPTSSTTSFPGSSQRSISGCTKVLQKFRYSSSFSGVNANRQPLFPRHVNQKSRGMVYVNQNRDDDCDDNDGKNQITQRPSLRKSLIGARSQRIVIDMKSVDERKSFNSSPILHEESKKRDIETTKSSQARPAVRSISLLSQFVYKGK

SEQ ID NO: 58 - protein, 475 aa, Escherichia coli DH1
  E.coli ExoI BAJ43803.1
MMNDGKQQSTFLFHDYETFGTHPALDRPAQFAAIRTDSEFNVIGEPEVFYCKPADDYLPQPGAVLITGITPQEARAKGENEAAFAARIHSLFTVPKTCILGYNNVRFDDEVTRNIFYRNFYDPYAWSWQHDNSRWDLLDVMRACYALRPEGINWPENDDGLPSFRLEHLTKANGIEHSNAHDAMADVYATIAMAKLVKTRQPRLFDYLFTHRNKHKLMALIDVPQMKPLVHVSGMFGAWRGNTSWVAPLAWHPENRNAVIMVDLAGDISPLLELDSDTLRERLYTAKTDLGDNAAVPVKLVHINKCPVLAQANTLRPEDADRLGINRQHCLDNLKILRENPQVREKVVAIFAEAEPFTPSDNVDAQLYNGFFSDADRAAMKIVLETEPRNLPALDITFVDKRIEKLLFNYRARNFPGTLDYAEQQRWLEHRRQVFTPEFLQGYADELQMLVQQYADDKEKVALLKALWQYAEEIV

SEQ ID NO: 59 - protein, 279 aa, Homo sapiens
  TREX2_HUMAN Q9BQ50.1
MGRAGSPLPRSSWPRMDDCGSRSRCSPTLCSSLRTCYPRGNITMSEAPRAETFVFLDLEATGLPSVEPEIAELSLFAVHRSSLENPEHDESGALVLPRVLDKLTLCMCPERPFTAKASEITGLSSEGLARCRKAGFDGAVVRTLQAFLSRQAGPICLVAHNGFDYDFPLLCAELRRLGARLPRDTVCLDTLPALRGLDRAHSHGTRARGRQGYSLGSLFHRYFRAEPSAAHSAEGDVHTLLLIFLHRAAELLAWADEQARGWAHIEPMYLPPDDPSLEA

SEQ ID NO: 60 - protein, 314 aa, Mus musculus
  TREX1_MOUSE Q91XB0.2
MGSQTLPHGHMQTLIFLDLEATGLPSSRPEVTELCLLAVHRRALENTSISQGHPPPVPRPPRVVDKLSLCIAPGKACSPGASEITGLSKAELEVQGRQRFDDNLAILLRAFLQRQPQPCCLVAHNGDRYDFPLLQTELARLSTPSPLDGTFCVDSIAALKALEQASSPSGNGSRKSYSLGSIYTRLYWQAPTDSHTAEGDVLTLLSICQWKPQALLQWVDEHARPFSTVKPMYGTPATTGTTNLRPHAATATTPLATANGSPSNGRSRRPKSPPPEKVPEAPSQEGLLAPLSLLTLLTLAIATLYGLFLASPGQ

SEQ ID NO: 61 - protein, 369 aa, Homo sapiens
  TREX1_HUMAN  Q9NSU2.1
MGPGARRQGRIVQGRPEMCFCPPPTPLPPLRILTLGTHTPTPCSSPGSAAGTYPTMGSQALPPGPMQTLIFFDMEATGLPFSQPKVTELCLLAVHRCALESPPTSQGPPPTVPPPPRVVDKLSLCVAPGKACSPAASEITGLSTAVLAAHGRQCFDDNLANLLLAFLRRQPQPWCLVAHNGDRYDFPLLQAELAMLGLTSALDGAFCVDSITALKALERASSPSEHGPRKSYSLGSIYTRLYGQSPPDSHTAEGDVLALLSICQWRPQALLRWVDAHARPFGTIRPMYGVTASARTKPRPSAVTTTAHLATTRNTSPSLGESRGTKDLPPVKDPGALSREGLLAPLGLLAILTLAVATLYGLSLATPGE

SEQ ID NO: 62 - protein, 315 aa, Bos taurus
  TREX1_BOVIN  Q9BG99.1
MGSRALPPGPVQTLIFLDLEATGLPFSQPKITELCLLAVHRYALEGLSAPQGPSPTAPVPPRVLDKLSLCVAPGKVCSPAASEITGLSTAVLAAHGRRAFDADLVNLIRTFLQRQPQPWCLVAHNGDRYDFPLLRAELALLGLASALDDAFCVDSIAALKALEPTGSSSEHGPRKSYSLGSVYTRLYGQAPPDSHTAEGDVLALLSVCQWRPRALLRWVDAHAKPFSTVKPMYVITTSTGTNPRPSAVTATVPLARASDTGPNLRGDRSPKPAPSPKMCPGAPPGEGLLAPLGLLAFLTLAVAMLYGLSLAMPGQ

SEQ ID NO: 63 - protein, 316 aa, Rattus norvegicus
  Rat TREX1 AAH91242.1
MGSQALPHGHMQTLIFLDLEATGLPYSQPKITELCLLAVHRHALENSSMSEGQPPPVPKPPRVVDKLSLCIAPGKPCSSGASEITGLTTAGLEAHGRQRFNDNLATLLQVFLQRQPQPCCLVAHNGDRYDFPLLQAELASLSVISPLDGTFCVDSIAALKTLEQASSPSEHGPRKSYSLGSIYTRLYGQAPTDSHTAEGDVLALLSICQWKPQALLQWVDKHARPFSTIKPMYGMAATTGTASPRLCAATTSSPLATANLSPSNGRSRGKRPTSPPPENVPEAPSREGLLAPLGLLTFLTLAIAVLYGIFLASPGQ

SEQ ID NO: 64 - protein, 829 aa, Homo sapiens
  Human DNA2 AAH63664.1
FAIPASRMEQLNELELLMEKSFWEEAELPAELFQKKVVASFPRTVLSTGMDNRYLVLAVNTVQNKEGNCEKRLVITASQSLENKELCILRNDWCSVPVEPGDIIHLEGDCTSDTWIIDKDFGYLILYPDMLISGTSIASSIRCMRRAVLSETFRSSDPATRQMLIGTVLHEVFQKAINNSFAPEKLQELAFQTIQEIRHLKEMYRLNLSQDEIKQEVEDYLPSFCKWAGDFMHKNTSTDFPQMQLSLPSDNSKDNSTCNIEVVKPMDIEESIWSPRFGLKGKIDVTVGVKIHRGYKTKYKIMPLELKTGKESNSIEHRSQVVLYTLLSQERRADPEAGLLLYLKTGQMYPVPANHLDKRELLKLRNQMAFSLFHRISKSATRQKTQLASLPQIIEEEKTCKYCSQIGNCALYSRAVEQQMDCSSVPIVMLPKIEEETQHLKQTHLEYFSLWCLMLTLESQSKDNKKNHQNIWLMPASEMEKSGSCIGNLIRMEHVKIVCDGQYLHNFQCKHGAIPVTNLMAGDRVIVSGEERSLFALSRGYVKEINMTTVTCLLDRNLSVLPESTLFRLDQEEKNCDIDTPLGNLSKLMENTFVSKKLRDLIIDFREPQFISYLSSVLPHDAKDTVACILKGLNKPQRQAMKKVLLSKDYTLIVGMPGTGKTTTICTLVPAPEQVEKGGVSNVTEAKLIVFLTSIFVKAGCSPSDIGIIAPYRQQLKIINDLLARSIGMVEVNTVDKYQGRDKSIVLVSFVRSNKDGTVGELLKDWRRLNVAITRAKHKLILLGCVPSLNCYPPLEKLLNHLNSEKLIIDLPSREHESLCHILGDFQRE

SEQ ID NO: 65 - protein, 1522 aa, Saccharomyces cerevisiae
  DNA2YEAST  P38859.1
MPGTPQKNKRSASISVSPAKKTEEKEIIQNDSKAILSKQTKRKKKYAFAPINNLNGKNTKVSNASVLKSIAVSQVRNTSRTKDINKAVSKSVKQLPNSQVKPKREMSNLSRHHDFTQDEDGPMEEVIWKYSPLQRDMSDKTTSAAEYSDDYEDVQNPSSTPIVPNRLKTVLSFTNIQVPNADVNQLIQENGNEQVRPKPAEISTRESLRNIDDILDDIEGDLTIKPTITKFSDLPSSPIKAPNVEKKAEVNAEEVDKMDSTGDSNDGDDSLIDILTQKYVEKRKSESQITIQGNTNQKSGAQESCGKNDNTKSRGEIEDHENVDNQAKTGNAFYENEEDSNCQRIKKNEKIEYNSSDEFSDDSLIELLNETQTQVEPNTIEQDLDKVEKMVSDDLRIATDSTLSAYALRAKSGAPRDGVVRLVIVSLRSVELPKIGTQKILECIDGKGEQSSVVVRHPWVYLEFEVGDVIHIIEGKNIENKRLLSDDKNPKTQLANDNLLVLNPDVLFSATSVGSSVGCLRRSILQMQFQDPRGEPSLVMTLGNIVHELLQDSIKYKLSHNKISMEIIIQKLDSLLETYSFSIIICNEEIQYVKELVMKEHAENILYFVNKFVSKSNYGCYTSISGTRRTQPISISNVIDIEENIWSPIYGLKGFLDATVEANVENNKKHIVPLEVKTGKSRSVSYEVQGLIYTLLLNDRYEIPIEFFLLYFTRDKNMTKFPSVLHSIKHILMSRNRMSMNFKHQLQEVFGQAQSRFELPPLLRDSSCDSCFIKESCMVLNKLLEDGTPEESGLVEGEFEILTNHLSQNLANYKEFFTKYNDLITKEESSITCVNKELFLLDGSTRESRSGRCLSGLVVSEVVEHEKTEGAYIYCFSRRRNDNNSQSMLSSQIAANDFVIISDEEGHFCLCQGRVQFINPAKIGISVKRKLLNNRLLDKEKGVTTIQSVVESELEQSSLIATQNLVTYRIDKNDIQQSLSLARFNLLSLFLPAVSPGVDIVDERSKLCRKTKRSDGGNEILRSLLVDNRAPKFRDANDDPVIPYKLSKDTTLNLNQKEAIDKVMRAEDYALILGMPGTGKTTVIAEIIKILVSEGKRVLLTSYTHSAVDNILIKLRNTNISIMRLGMKHKVHPDTQKYVPNYASVKSYNDYLSKINSTSVVATTCLGINDILFTLNEKDFDYVILDEASQISMPVALGPLRYGNRFIMVGDHYQLPPLVKNDAARLGGLEESLFKTFCEKHPESVAELTLQYRMCGDIVTLSNFLIYDNKLKCGNNEVFAQSLELPMPEALSRYRNESANSKQWLEDILEPTRKVVFLNYDNCPDIIEQSEKDNITNHGEAELTLQCVEGMLLSGVPCEDIGVMTLYRAQLRLLKKIFNKNVYDGLEILTADQFQGRDKKCIIISMVRRNSQLNGGALLKELRRVNVAMTRAKSKLIIIGSKSTIGSVPEIKSFVNLLEERNWVYTMCKDALYKYKFPDRSNAIDEARKGCGKRTGAKPITSKSKFVSDKPIIKEILQEYES

SEQ ID NO: 66 - protein, 490 aa, Human herpesvirus 2
  VP16 AAA45863.1
MDLLVDDLFADRDGVSPPPPRPAGGPKNTPAAPPLYATGRLSQAQLMPSPPMPVPPAALFNRLLDDLGFSAGPALCTMLDTWNEDLFSGFPTNADMYRECKFLSTLPSDVIDWGDAHVPERSPIDIRAHGDVAFPTLPATRDELPSYYEAMAQFFRGELRAREESYRTVLANFCSALYRYLRASVRQLHRQAHMRGRNRDLREMLRTTIADRYYRETARLARVLFLHLYLFLSREILWAAYAEQMMRPDLFDGLCCDLESWRQLACLFQPLMFINGSLTVRGVPVEARRLRELNHIREHLNLPLVRSAAAEEPGAPLTTPPVLQGNQARSSGYFMLLIRAKLDSYSSVATSEGESVMREHAYSRGRTRNNYGSTIEGLLDLPDDDDAPAEAGLVAPRMSFLSAGQRPRRLSTTAPITDVSLGDELRLDGEEVDMTPADALDDFDLEMLGDVESPSPGMTHDPVSYGALDVDDFEFEQMFTDAMGIDDFGG

SEQ ID NO: 67 - protein, 3 aa, Artificial Sequence
  1a8h_1 peptidic linker
NVG

SEQ ID NO: 68 - protein, 4 aa, Artificial Sequence
  1dnpA_1 peptidic linker
DSVI

SEQ ID NO: 69 - protein, 4 aa, Artificial Sequence
  1d8cA_2 peptidic linker
IVEA

SEQ ID NO: 70 - protein, 4 aa, Artificial Sequence
  1ckqA_3 peptidic linker
LEGS

SEQ ID NO: 71 - protein, 4 aa, Artificial Sequence
  1sbp_1 peptidic linker
YTST

SEQ ID NO: 72 - protein, 5 aa, Artificial Sequence
  1ev7A_1 peptidic linker
LQENL

SEQ ID NO: 73 - protein, 5 aa, Artificial Sequence
  1alo_3 peptidic linker
VGRQP

SEQ ID NO: 74 - protein, 5 aa, Artificial Sequence
  1amf_1 peptidic linker
LGNSL

SEQ ID NO: 75 - protein, 6 aa, Artificial Sequence
  1adjA_3 peptidic linker
LPEEKG

SEQ ID NO: 76 - protein, 6 aa, Artificial Sequence
  1fcdC_1 peptidic linker
QTYQPA

SEQ ID NO: 77 - protein, 6 aa, Artificial Sequence
  1al3_2 peptidic linker
FSHSTT

SEQ ID NO: 78 - protein, 7 aa, Artificial Sequence
  1g3p_1 peptidic linker
GYTYINP

SEQ ID NO: 79 - protein, 7 aa, Artificial Sequence
  1acc_3 peptidic linker
LTKYKSS

SEQ ID NO: 80 - protein, 8 aa, Artificial Sequence
  1ahjB_1 peptidic linker
SRPSESEG

SEQ ID NO: 81 - protein, 8 aa, Artificial Sequence
  1acc_1 peptidic linker
PELKQKSS

SEQ ID NO: 82 - protein, 8 aa, Artificial Sequence
  1af7_1 peptidic linker
LTTNLTAF

SEQ ID NO: 83 - protein, 9 aa, Artificial Sequence
  1heiA_1 peptidic linker
TATPPGSVT

SEQ ID NO: 84 - protein, 9 aa, Artificial Sequence
  1bia_2 peptidic linker
LDNFINRPV

SEQ ID NO: 85 - protein, 9 aa, Artificial Sequence
  1igtB_1 peptidic linker
VSSAKTTAP

SEQ ID NO: 86 - protein, 10 aa, Artificial Sequence
  1nfkA_1 peptidic linker
DSKAPNASNL

SEQ ID NO: 87 - protein, 10 aa, Artificial Sequence
  1au7A_1 peptidic linker
KRRTTISIAA

SEQ ID NO: 88 - protein, 11 aa, Artificial Sequence
  1bpoB_1 peptidic linker
PVKMFDRHSSL

SEQ ID NO: 89 - protein, 11 aa, Artificial Sequence
  1b0pA_2 peptidic linker
APAETKAEPMT

SEQ ID NO: 90 - protein, 14 aa, Artificial Sequence
  1c05A_2 peptidic linker
YTRLPERSELPAEI

SEQ ID NO: 91 - protein, 14 aa, Artificial Sequence
  1gcb_1 peptidic linker
VSTDSTPVTNQKSS

SEQ ID NO: 92 - protein, 14 aa, Artificial Sequence
  1bt3A_1 peptidic linker
YKLPAVTTMKVRPA

SEQ ID NO: 93 - protein, 15 aa, Artificial Sequence
  1b3oB_2 peptidic linker
IARTDLKKNRDYPLA

SEQ ID NO: 94 - protein, 21 aa, Artificial Sequence
  16vpA_6 peptidic linker
TEEPGAPLTTPPTLHGNQARA

SEQ ID NO: 95 - protein, 21 aa, Artificial Sequence
  1dhx_1 peptidic linker
ARFTLAVGDNRVLDMASTYFD

SEQ ID NO: 96 - protein, 26 aa, Artificial Sequence
  1b8aA_1 peptidic linker
IVVLNRAETPLPLDPTGKVKAELDTR

SEQ ID NO: 97 - protein, 28 aa, Artificial Sequence
  1qu6A_1 peptidic linker
ILNKEKKAVSPLLLTTTNSSEGLSMGNY

SEQ ID NO: 98 - protein, 20 aa, Artificial Sequence
  NFS1 peptidic linker
GSDITKSKISEKMKGQGPSG

SEQ ID NO: 99 - protein, 23 aa, Artificial Sequence
  NFS2 peptidic linker
GSDITKSKISEKMKGLGPDGRKA

SEQ ID NO: 100 - protein, 10 aa, Artificial Sequence
  CFS1 peptidic linker
SLTKSKISGS

SEQ ID NO: 101 - protein, 32 aa, Artificial Sequence
  RM2 peptidic linker
AAGGSALTAGALSLTAGALSLTAGALSGGGGS

SEQ ID NO: 102 - protein, 27 aa, Artificial Sequence
  BQY peptidic linker
AAGASSVSASGHIAPLSLPSSPPSVGS

SEQ ID NO: 103 - protein, 5 aa, Artificial Sequence
  QGPSG peptidic linker
QGPSG

SEQ ID NO: 104 - protein, 8 aa, Artificial Sequence
  LGPDGRKA peptidic linker
LGPDGRKA

SEQ ID NO: 105 - DNA, 43 bp, Artificial Sequence
  I-TevI target
caacgctcagtagatgttttcttgggtctaccgtttaatattg

SEQ ID NO: 106 - protein, 167 aa, Artificial sequence
  I-CreI
MANTKYNKEFLLYLAGFVDGDGSIIAQIKPNQSYKFKHQLSLTFQVTQKTQRRWFLDKLVDEIGVGYVRDRGSVSDYILSEIKPLHNFLTQLQPFLKLKQKQANLVLKIIEQLPSAKESPDKFLEVCTWVDQIAALNDSKTRKTTSETVRAVLDSLSEKKKSSPAAD

SEQ ID NO: 107 - protein, 245 aa, Artificial sequence; identical to SEQ ID NO: 20
  I-TevI

SEQ ID NO: 108 - protein, 167 aa, Artificial sequence
  I-CreI_N20
MANTKYNKEFLLYLAGFVDGNGSIIAQIKPNQSYKFKHQLSLTFQVTQKTQRRWFLDKLVDEIGVGYVRDRGSVSDYILSEIKPLHNFLTQLQPFLKLKQKQANLVLKIIEQLPSAKESPDKFLEVCTWVDQIAALNDSKTRKTTSETVRAVLDSLSEKKKSSPAAD

SEQ ID NO: 109 - protein, 366 aa, Artificial sequence
  hTevCre_D01
MKSGIYQIKNTLNNKVYVGSAKDFEKRWKRHFKDLEKGCHSSIKLQRSFNKHGNVFECSILEEIPYEKDLIIERENFWIKELNSKINGYNIADATFGDTCSTHPLKEEIIKKRSETVKAKMLKLGPDGRKALYSKPGSKNGRWNPETHKFCKCGVRIQTSAYTCSKCRNRSGENNSFFNHKHSDITKSKISGKMKGQGPSGNTKYNKEFLLYLAGFVDGDGSIIAQIKPNQSYKFKHQLSLTFQVTQKTQRRWFLDKLVDEIGVGYVRDRGSVSDYILSEIKPLHNFLTQLQPFLKLKQKQANLVLKIIEQLPSAKESPDKFLEVCTWVDQIAALNDSKTRKTTSETVRAVLDSLSEKKKSSPAAD

SEQ ID NO: 110 - protein, 353 aa, Artificial sequence
  hTevCre_D02
MKSGIYQIKNTLNNKVYVGSAKDFEKRWKRHFKDLEKGCHSSIKLQRSFNKHGNVFECSILEEIPYEKDLIIERENFWIKELNSKINGYNIADATFGDTCSTHPLKEEIIKKRSETVKAKMLKLGPDGRKALYSKPGSKNGRWNPETHKFCKCGVRIQTSAYTCSKCRNRSGENNSFFNHKHSQGPSGNTKYNKEFLLYLAGFVDGDGSIIAQIKPNQSYKFKHQLSLTFQVTQKTQRRWFLDKLVDEIGVGYVRDRGSVSDYILSEIKPLHNFLTQLQPFLKLKQKQANLVLKIIEQLPSAKESPDKFLEVCTWVDQIAALNDSKTRKTTSETVRAVLDSLSEKKKSSPAAD

SEQ ID NO: 111 - protein, 339 aa, Artificial sequence
  hTevCre_D03
MKSGIYQIKNTLNNKVYVGSAKDFEKRWKRHFKDLEKGCHSSIKLQRSFNKHGNVFECSILEEIPYEKDLIIERENFWIKELNSKINGYNIADATFGDTCSTHPLKEEIIKKRSETVKAKMLKLGPDGRKALYSKPGSKNGRWNPETHKFCKCGVRIQTSAYTCSKCRNQGPSGNTKYNKEFLLYLAGFVDGDGSIIAQIKPNQSYKFKHQLSLTFQVTQKTQRRWFLDKLVDEIGVGYVRDRGSVSDYILSEIKPLHNFLTQLQPFLKLKQKQANLVLKIIEQLPSAKESPDKFLEVCTWVDQIAALNDSKTRKTTSETVRAVLDSLSEKKKSSPAAD

SEQ ID NO: 112 - protein, 318 aa, Artificial sequence
  hTevCre_D04
MKSGIYQIKNTLNNKVYVGSAKDFEKRWKRHFKDLEKGCHSSIKLQRSFNKHGNVFECSILEEIPYEKDLIIERENFWIKELNSKINGYNIADATFGDTCSTHPLKEEIIKKRSETVKAKMLKLGPDGRKALYSKPGSKNGRWNPETHQGPSGNTKYNKEFLLYLAGFVDGDGSIIAQIKPNQSYKFKHQLSLTFQVTQKTQRRWFLDKLVDEIGVGYVRDRGSVSDYILSEIKPLHNFLTQLQPFLKLKQKQANLVLKIIEQLPSAKESPDKFLEVCTWVDQIAALNDSKTRKTTSETVRAVLDSLSEKKKSSPAAD

SEQ ID NO: 113 - protein, 293 aa, Artificial sequence
  hTevCre_D05
MKSGIYQIKNTLNNKVYVGSAKDFEKRWKRHFKDLEKGCHSSIKLQRSFNKHGNVFECSILEEIPYEKDLIIERENFWIKELNSKINGYNIADATFGDTCSTHPLKEEIIKKRSETVKAKMLKQGPSGNTKYNKEFLLYLAGFVDGDGSIIAQIKPNQSYKFKHQLSLTFQVTQKTQRRWFLDKLVDEIGVGYVRDRGSVSDYILSEIKPLHNFLTQLQPFLKLKQKQANLVLKIIEQLPSAKESPDKFLEVCTWVDQIAALNDSKTRKTTSETVRAVLDSLSEKKKSSPAAD

SEQ ID NO: 114 - protein, 296 aa, Artificial sequence
  hTevCre_D06
MKSGIYQIKNTLNNKVYVGSAKDFEKRWKRHFKDLEKGCHSSIKLQRSFNKHGNVFECSILEEIPYEKDLIIERENFWIKELNSKINGYNIADATFGDTCSTHPLKEEIIKKRSETVKAKMLKLGPDGRKANTKYNKEFLLYLAGFVDGDGSIIAQIKPNQSYKFKHQLSLTFQVTQKTQRRWFLDKLVDEIGVGYVRDRGSVSDYILSEIKPLHNFLTQLQPFLKLKQKQANLVLKIIEQLPSAKESPDKFLEVCTWVDQIAALNDSKTRKTTSETVRAVLDSLSEKKKSSPAAD

SEQ ID NO: 115 - protein, 366 aa, Artificial sequence
  hTevCre_D01_N20
MKSGIYQIKNTLNNKVYVGSAKDFEKRWKRHFKDLEKGCHSSIKLQRSFNKHGNVFECSILEEIPYEKDLIIERENFWIKELNSKINGYNIADATFGDTCSTHPLKEEIIKKRSETVKAKMLKLGPDGRKALYSKPGSKNGRWNPETHKFCKCGVRIQTSAYTCSKCRNRSGENNSFFNHKHSDITKSKISGKMKGQGPSGNTKYNKEFLLYLAGFVDGNGSIIAQIKPNQSYKFKHQLSLTFQVTQKTQRRWFLDKLVDEIGVGYVRDRGSVSDYILSEIKPLHNFLTQLQPFLKLKQKQANLVLKIIEQLPSAKESPDKFLEVCTWVDQIAALNDSKTRKTTSETVRAVLDSLSEKKKSSPAAD

SEQ ID NO: 116 - protein, 353 aa, Artificial sequence
  hTevCre_D02_N20
MKSGIYQIKNTLNNKVYVGSAKDFEKRWKRHFKDLEKGCHSSIKLQRSFNKHGNVFECSILEEIPYEKDLIIERENFWIKELNSKINGYNIADATFGDTCSTHPLKEEIIKKRSETVKAKMLKLGPDGRKALYSKPGSKNGRWNPETHKFCKCGVRIQTSAYTCSKCRNRSGENNSFFNHKHSQGPSGNTKYNKEFLLYLAGFVDGNGSIIAQIKPNQSYKFKHQLSLTFQVTQKTQRRWFLDKLVDEIGVGYVRDRGSVSDYILSEIKPLHNFLTQLQPFLKLKQKQANLVLKIIEQLPSAKESPDKFLEVCTWVDQIAALNDSKTRKTTSETVRAVLDSLSEKKKSSPAAD

SEQ ID NO: 117 - protein, 339 aa, Artificial sequence
  hTevCre_D03_N20
MKSGIYQIKNTLNNKVYVGSAKDFEKRWKRHFKDLEKGCHSSIKLQRSFNKHGNVFECSILEEIPYEKDLIIERENFWIKELNSKINGYNIADATFGDTCSTHPLKEEIIKKRSETVKAKMLKLGPDGRKALYSKPGSKNGRWNPETHKFCKCGVRIQTSAYTCSKCRNQGPSGNTKYNKEFLLYLAGFVDGNGSIIAQIKPNQSYKFKHQLSLTFQVTQKTQRRWFLDKLVDEIGVGYVRDRGSVSDYILSEIKPLHNFLTQLQPFLKLKQKQANLVLKIIEQLPSAKESPDKFLEVCTWVDQIAALNDSKTRKTTSETVRAVLDSLSEKKKSSPAAD

SEQ ID NO: 118 - protein, 318 aa, Artificial sequence
  hTevCre_D04_N20
MKSGIYQIKNTLNNKVYVGSAKDFEKRWKRHFKDLEKGCHSSIKLQRSFNKHGNVFECSILEEIPYEKDLIIERENFWIKELNSKINGYNIADATFGDTCSTHPLKEEIIKKRSETVKAKMLKLGPDGRKALYSKPGSKNGRWNPETHQGPSGNTKYNKEFLLYLAGFVDGNGSIIAQIKPNQSYKFKHQLSLTFQVTQKTQRRWFLDKLVDEIGVGYVRDRGSVSDYILSEIKPLHNFLTQLQPFLKLKQKQANLVLKIIEQLPSAKESPDKFLEVCTWVDQIAALNDSKTRKTTSETVRAVLDSLSEKKKSSPAAD

SEQ ID NO: 119 - protein, 293 aa, Artificial sequence
  hTevCre_D05_N20
MKSGIYQIKNTLNNKVYVGSAKDFEKRWKRHFKDLEKGCHSSIKLQRSFNKHGNVFECSILEEIPYEKDLIIERENFWIKELNSKINGYNIADATFGDTCSTHPLKEEIIKKRSETVKAKMLKQGPSGNTKYNKEFLLYLAGFVDGNGSIIAQIKPNQSYKFKHQLSLTFQVTQKTQRRWFLDKLVDEIGVGYVRDRGSVSDYILSEIKPLHNFLTQLQPFLKLKQKQANLVLKIIEQLPSAKESPDKFLEVCTWVDQIAALNDSKTRKTTSETVRAVLDSLSEKKKSSPAAD

SEQ ID NO: 120 - protein, 296 aa, Artificial sequence
  hTevCre_D06_N20
MKSGIYQIKNTLNNKVYVGSAKDFEKRWKRHFKDLEKGCHSSIKLQRSFNKHGNVFECSILEEIPYEKDLIIERENFWIKELNSKINGYNIADATFGDTCSTHPLKEEIIKKRSETVKAKMLKLGPDGRKANTKYNKEFLLYLAGFVDGNGSIIAQIKPNQSYKFKHQLSLTFQVTQKTQRRWFLDKLVDEIGVGYVRDRGSVSDYILSEIKPLHNFLTQLQPFLKLKQKQANLVLKIIEQLPSAKESPDKFLEVCTWVDQIAALNDSKTRKTTSETVRAVLDSLSEKKKSSPAAD

SEQ ID NO: 121 - protein, 157 aa, Artificial sequence
  I-CreI_X
MANTKYNKEFLLYLAGFVDGDGSIIAQIKPNQSYKFKHQLSLTFQVTQKTQRRWFLDKLVDEIGVGYVRDRGSVSDYILSEIKPLHNFLTQLQPFLKLKQKQANLVLKIIEQLPSAKESPDKFLEVCTWVDQIAALNDSKTRKTTSETVRAVLDSAD

SEQ ID NO: 122 - protein, 177 aa, Artificial sequence
  I-CreI_NFS1
MAGSDITKSKISEKMKGQGPSGNTKYNKEFLLYLAGFVDGDGSIIAQIKPNQSYKFKHQLSLTFQVTQKTQRRWFLDKLVDEIGVGYVRDRGSVSDYILSEIAPLHNFLTQLQPFLKLKQKQANLVLKIIEQLPSAKESPDKFLEVCTWVDQIAALNDSKTRKTTSETVRAVLDSAD

SEQ ID NO: 123 - protein, 180 aa, Artificial sequence
  I-CreI_NFS2
MAGSDITKSKISEKMKGLGPDGRKANTKYNKEFLLYLAGFVDGDGSIIAQIKPNQSYKFKHQLSLTFQVTQKTQRRWFLDKLVDEIGVGYVRDRGSVSDYILSEIAPLHNFLTQLQPFLKLKQKQANLVLKIIEQLPSAKESPDKFLEVCTWVDQIAALNDSKTRKTTSETVRAVLDSAD

SEQ ID NO: 124 - protein, 166 aa, Artificial sequence
  I-CreI_CFS1
MANTKYNKEFLLYLAGFVDGDGSIIAQIKPNQSYKFKHQLSLTFQVTQKTQRRWFLDKLVDEIGVGYVRDRGSVSDYILSEIKPLHNFLTQLQPFLKLKQKQANLVLKIIEQLPSAKESPDKFLEVCTWVDQIAALNDSKTRKTTSETVRAVLDSLTKSKISGSAD

SEQ ID NO: 125 - protein, 177 aa, Artificial sequence
  I-CreI_NFS1_N20
MAGSDITKSKISEKMKGQGPSGNTKYNKEFLLYLAGFVDGNGSIIAQIKPNQSYKFKHQLSLTFQVTQKTQRRWFLDKLVDEIGVGYVRDRGSVSDYILSEIAPLHNFLTQLQPFLKLKQKQANLVLKIIEQLPSAKESPDKFLEVCTWVDQIAALNDSKTRKTTSETVRAVLDSAD

SEQ ID NO: 126 - protein, 180 aa, Artificial sequence
  I-CreI_NFS2_N20
MAGSDITKSKISEKMKGLGPDGRKANTKYNKEFLLYLAGFVDGNGSIIAQIKPNQSYKFKHQLSLTFQVTQKTQRRWFLDKLVDEIGVGYVRDRGSVSDYILSEIAPLHNFLTQLQPFLKLKQKQANLVLKIIEQLPSAKESPDKFLEVCTWVDQIAALNDSKTRKTTSETVRAVLDSAD

SEQ ID NO: 127 - protein, 166 aa, Artificial sequence
  I-CreI_CFS1_N20
MANTKYNKEFLLYLAGFVDGNGSIIAQIKPNQSYKFKHQLSLTFQVTQKTQRRWFLDKLVDEIGVGYVRDRGSVSDYILSEIKPLHNFLTQLQPFLKLKQKQANLVLKIIEQLPSAKESPDKFLEVCTWVDQIAALNDSKTRKTTSETVRAVLDSLTKSKISGSAD

SEQ ID NO: 128 - protein, 311 aa, Artificial sequence
  hColE7Cre_D0101
MASGSKRNKPGKATGKGKPVNNKWLNNAGKDLGSPVPDRIANKLRDKEFKSFDDFRKKFWEEVSKDPELSKQFSRNNNDRMKVGKAPKTRTQDVSGKRTSFELHHEKPISQNGGVYDMDNISVVTPKRHIDIHRGKGSDITKSKISEKMKGQGPSGNTKYNKEFLLYLAGFVDGDGSIIAQIKPNQSYKFKHQLSLTFQVTQKTQRRWFLDKLVDEIGVGYVRDRGSVSDYILSEIAPLHNFLTQLQPFLKLKQKQANLVLKIIEQLPSAKESPDKFLEVCTWVDQIAALNDSKTRKTTSETVRAVLDSAD

SEQ ID NO: 129 - protein, 314 aa, Artificial sequence
  hColE7Cre_D0102
MASGSKRNKPGKATGKGKPVNNKWLNNAGKDLGSPVPDRIANKLRDKEFKSFDDFRKKFWEEVSKDPELSKQFSRNNNDRMKVGKAPKTRTQDVSGKRTSFELHHEKPISQNGGVYDMDNISVVTPKRHIDIHRGKGSDITKSKISEKMKGLGPDGRKANTKYNKEFLLYLAGFVDGDGSIIAQIKPNQSYKFKHQLSLTFQVTQKTQRRWFLDKLVDEIGVGYVRDRGSVSDYILSEIAPLHNFLTQLQPFLKLKQKQANLVLKIIEQLPSAKESPDKFLEVCTWVDQIAALNDSKTRKTTSETVRAVLDSAD

SEQ ID NO: 130 - protein, 300 aa, Artificial sequence
  hCreColE7_D0101
MANTKYNKEFLLYLAGFVDGDGSIIAQIKPNQSYKFKHQLSLTFQVTQKTQRRWFLDKLVDEIGVGYVRDRGSVSDYILSEIKPLHNFLTQLQPFLKLKQKQANLVLKIIEQLPSAKESPDKFLEVCTWVDQIAALNDSKTRKTTSETVRAVLDSLTKSKISGSKRNKPGKATGKGKPVNNKWLNNAGKDLGSPVPDRIANKLRDKEFKSFDDFRKKFWEEVSKDPELSKQFSRNNNDRMKVGKAPKTRTQDVSGKRTSFELHHEKPISQNGGVYDMDNISVVTPKRHIDIHRGKGSSAD

SEQ ID NO: 131 - protein, 311 aa, Artificial sequence
  hColE7Cre_D0101_N20
MASGSKRNKPGKATGKGKPVNNKWLNNAGKDLGSPVPDRIANKLRDKEFKSFDDFRKKFWEEVSKDPELSKQFSRNNNDRMKVGKAPKTRTQDVSGKRTSFELHHEKPISQNGGVYDMDNISVVTPKRHIDIHRGKGSDITKSKISEKMKGQGPSGNTKYNKEFLLYLAGFVDGNGSIIAQIKPNQSYKFKHQLSLTFQVTQKTQRRWFLDKLVDEIGVGYVRDRGSVSDYILSEIAPLHNFLTQLQPFLKLKQKQANLVLKIIEQLPSAKESPDKFLEVCTWVDQIAALNDSKTRKTTSETVRAVLDSAD

SEQ ID NO: 132 - protein, 314 aa, Artificial sequence
  hColE7Cre_D0102_N20
MASGSKRNKPGKATGKGKPVNNKWLNNAGKDLGSPVPDRIANKLRDKEFKSFDDFRKKFWEEVSKDPELSKQFSRNNNDRMKVGKAPKTRTQDVSGKRTSFELHHEKPISQNGGVYDMDNISVVTPKRHIDIHRGKGSDITKSKISEKMKGLGPDGRKANTKYNKEFLLYLAGFVDGNGSIIAQIKPNQSYKFKHQLSLTFQVTQKTQRRWFLDKLVDEIGVGYVRDRGSVSDYILSEIAPLHNFLTQLQPFLKLKQKQANLVLKIIEQLPSAKESPDKFLEVCTWVDQIAALNDSKTRKTTSETVRAVLDSAD

SEQ ID NO: 133 - protein, 300 aa, Artificial sequence
  hCreColE7_D0101_N20
MANTKYNKEFLLYLAGFVDGNGSIIAQIKPNQSYKFKHQLSLTFQVTQKTQRRWFLDKLVDEIGVGYVRDRGSVSDYILSEIKPLHNFLTQLQPFLKLKQKQANLVLKIIEQLPSAKESPDKFLEVCTWVDQIAALNDSKTRKTTSETVRAVLDSLTKSKISGSKRNKPGKATGKGKPVNNKWLNNAGKDLGSPVPDRIANKLRDKEFKSFDDFRKKFWEEVSKDPELSKQFSRNNNDRMKVGKAPKTRTQDVSGKRTSFELHHEKPISQNGGVYDMDNISVVTPKRHIDIHRGKGSSAD

SEQ ID NO: 134 - protein, 518 aa, Artificial sequence
  sT1
DPIRSRTPSPARELLPGPQPDGVQPTADRGVSPPAGGPLDGLPARRTMSRTRLPSPPAPSPAFSAGSFSDLLRQFDPSLFNTSLFDSLPPFGAHHTEAATGEWDEVQSGLRAADAPPPTMRVAVTAARPPRAKPAPRRRAAQPSDASPAAQVDLRTLGYSQQQQEKIKPKVRSTVAQHHEALVGHGFTHAHIVALSQHPAALGTVAVKYQDMIAALPEATHEAIVGVGKQWSGARALEALLTVAGELRGPPLQLDTGQLLKIAKRGGVTAVEAVHAWRNALTGAPLNSIVAQLSRPDPALAALTNDHLVALACLGGRPALDAVKKGLPHAPALIKRTNRRIPERTSHRVADHAQVVRVLGFFQCHSHPAQAFDDAMTQFGMSRHGLLQLFRRVGVTELEARSGTLPPASQRWDRILQASGMKRAKPSPTSTQTPDQASLHAFADSLERDLDAPSPMHEGDQTRASSRKRSRSDRAVTGPSAQQSFEVRVPEQRDALHLPLSWRVKRPRTSIGGGLPDP

SEQ ID NO: 135 - protein, 147 aa, Artificial sequence
  sT2
VDLRTLGYSQQQQEKIKPKVRSTVAQHHEALVGHGFTHAHIVALSQHPAALGTVAVKYQDMIAALPEATHEAIVGVGKQWSGARALEALLTVAGELRGPPLQLDTGQLLKIAKRGGVTAVEAVHAWRNALTGAPLNSIVAQLSRPDP

SEQ ID NO: 136 - protein, 1116 aa, Artificial sequence
  bT1-Avr
DPIRSRTPSPARELLPGPQPDGVQPTADRGVSPPAGGPLDGLPARRTMSRTRLPSPPAPSPAFSAGSFSDLLRQFDPSLFNTSLFDSLPPFGAHHTEAATGEWDEVQSGLRAADAPPPTMRVAVTAARPPRAKPAPRRRAAQPSDASPAAQVDLRTLGYSQQQQEKIKPKVRSTVAQHHEALVGHGFTHAHIVALSQHPAALGTVAVKYQDMIAALPEATHEAIVGVGKQWSGARALEALLTVAGELRGPPLQLDTGQLLKIAKRGGVTAVEAVHAWRNALTGAPLNLTPEQVVAIASNIGGKQALETVQALLPVLCQAHGLTPQQVVAIASNGGGKQALETVQRLLPVLCQAHGLTPEQVVAIASNIGGKQALETVQALLPVLCQAHGLTPQQVVAIASNGGGKQALETVQRLLPVLCQAHGLTPEQVVAIASNIGGKQALETVQALLPVLCQAHGLTPEQVVAIASNIGGKQALETVQALLPVLCQAHGLTPEQVVAIASNIGGKQALETVQALLPVLCQAHGLTPEQVVAIASHDGGKQALETVQRLLPVLCQAHGLTPEQVVAIASHDGGKQALETVQRLLPVLCQAHGLTPQQVVAIASNGGGKQALETVQRLLPVLCQAHGLTPEQVVAIASNIGGKQALETVQALLPVLCQAHGLTPEQVVAIASNIGGKQALETVQALLPVLCQAHGLTPEQVVAIASHDGGKQALETVQRLLPVLCQAHGLTPEQVVAIASHDGGKQALETVQRLLPVLCQAHGLTPEQVVAIASHDGGKQALETVQRLLPVLCQAHGLTPQQVVAIASNGGGKQALETVQRLLPVLCQAHGLTPEQVVAIASHDGGKQALETVQRLLPVLCQAHGLTPQQVVAIASNGGGRPALESIVAQLSRPDPALAALTNDHLVALACLGGRPALDAVKKGLPHAPALIKRTNRRIPERTSHRVADHAQVVRVLGFFQCHSHPAQAFDDAMTQFGMSRHGLLQLFRRVGVTELEARSGTLPPASQRWDRILQASGMKRAKPSPTSTQTPDQASLHAFADSLERDLDAPSPMHEGDQTRASSRKRSRSDRAVTGPSAQQSFEVRVPEQRDALHLPLSWRVKRPRTSIGGGLPDP

SEQ ID NO: 137 - protein, 745 aa, Artificial sequence
  bT2-Avr
VDLRTLGYSQQQQEKIKPKVRSTVAQHHEALVGHGFTHAHIVALSQHPAALGTVAVKYQDMIAALPEATHEAIVGVGKQWSGARALEALLTVAGELRGPPLQLDTGQLLKIAKRGGVTAVEAVHAWRNALTGAPLNLTPEQVVAIASNIGGKQALETVQALLPVLCQAHGLTPQQVVAIASNGGGKQALETVQRLLPVLCQAHGLTPEQVVAIASNIGGKQALETVQALLPVLCQAHGLTPQQVVAIASNGGGKQALETVQRLLPVLCQAHGLTPEQVVAIASNIGGKQALETVQALLPVLCQAHGLTPEQVVAIASNIGGKQALETVQALLPVLCQAHGLTPEQVVAIASNIGGKQALETVQALLPVLCQAHGLTPEQVVAIASHDGGKQALETVQRLLPVLCQAHGLTPEQVVAIASHDGGKQALETVQRLLPVLCQAHGLTPQQVVAIASNGGGKQALETVQRLLPVLCQAHGLTPEQVVAIASNIGGKQALETVQALLPVLCQAHGLTPEQVVAIASNIGGKQALETVQALLPVLCQAHGLTPEQVVAIASHDGGKQALETVQRLLPVLCQAHGLTPEQVVAIASHDGGKQALETVQRLLPVLCQAHGLTPEQVVAIASHDGGKQALETVQRLLPVLCQAHGLTPQQVVAIASNGGGKQALETVQRLLPVLCQAHGLTPEQVVAIASHDGGKQALETVQRLLPVLCQAHGLTPQQVVAIASNGGGRPALESIVAQLSRPDP

SEQ ID NO: 138 - protein, 1320 aa, Artificial sequence
  bT1-Pth
DPIRSRTPSPARELLPGPQPDGVQPTADRGVSPPAGGPLDGLPARRTMSRTRLPSPPAPSPAFSAGSFSDLLRQFDPSLFNTSLFDSLPPFGAHHTEAATGEWDEVQSGLRAADAPPPTMRVAVTAARPPRAKPAPRRRAAQPSDASPAAQVDLRTLGYSQQQQEKIKPKVRSTVAQHHEALVGHGFTHAHIVALSQHPAALGTVAVKYQDMIAALPEATHEAIVGVGKQWSGARALEALLTVAGELRGPPLQLDTGQLLKIAKRGGVTAVEAVHAWRNALTGAPLNLTPEQVVAIASNKGGKQALETVQRLLPVLCQAHGLTPEQVVAIASHDGGKQALETVQRLLPVLCQAHGLTPEQVVAIASNIGGKQALETVQALLPVLCQAHGLTPQQVVAIASNGGGKQALETVQRLLPVLCQAHGLTPEQVVAIASHDGGKQALETVQRLLPVLCQAHGLTPQQVVAIASNGGGKQALETVQRLLPVLCQAHGLTPEQVVAIASHDGGKQALETVQRLLPVLCQAHGLTPEQVVAIASHDGGKQALETVQRLLPVLCQAHGLTPEQVVAIASHDGGKQALETVQRLLPVLCQAHGLTPEQVVAIASHDGGKQALETVQRLLPVLCQAHGLTPEQVVAIASHDGGKQALETVQRLLPVLCQAHGLTPQQVVAIASNGGGKQALETVQRLLPVLCQAHGLTPEQVVAIASNIGGKQALETVQALLPVLCQAHGLTPEQVVAIASHDGGKQALETVQRLLPVLCQAHGLTPQQVVAIASNGGGKQALETVQRLLPVLCQAHGLTPEQVVAIASNKGGKQALETVQRLLPVLCQAHGLTPQQVVAIASNGGGKQALETVQRLLPVLCQAHGLTPEQVVAIASNIGGKQALETVQALLPVLCQAHGLTPEQVVAIASHDGGKQALETVQRLLPVLCQAHGLTPEQVVAIASNIGGKQALETVQALLPVLCQAHGLTPEQVVAIASHDGGKQALETVQRLLPVLCQAHGLTPEQVVAIASHDGGKQALETVQRLLPVLCQAHGLTPEQVVAIASNIGGKQALETVQALLPVLCQAHGLTPQQVVAIASHDGGRPALESIVAQLSRPDPALAALTNDHLVALACLGGRPALDAVKKGLPHAPALIKRTNRRIPERTSHRVADHAQVVRVLGFFQCHSHPAQAFDDAMTQFGMSRHGLLQLFRRVGVTELEARSGTLPPASQRWDRILQASGMKRAKPSPTSTQTPDQASLHAFADSLERDLDAPSPMHEGDQTRASSRKRSRSDRAVTGPSAQQSFEVRVPEQRDALHLPLSWRVKRPRTSIGGGLPDP

SEQ ID NO: 139 - protein, 949 aa, Artificial sequence
  bT2-Pth
VDLRTLGYSQQQQEKIKPKVRSTVAQHHEALVGHGFTHAHIVALSQHPAALGTVAVKYQDMIAALPEATHEAIVGVGKQWSGARALEALLTVAGELRGPPLQLDTGQLLKIAKRGGVTAVEAVHAWRNALTGAPLNLTPEQVVAIASNKGGKQALETVQRLLPVLCQAHGLTPEQVVAIASHDGGKQALETVQRLLPVLCQAHGLTPEQVVAIASNIGGKQALETVQALLPVLCQAHGLTPQQVVAIASNGGGKQALETVQRLLPVLCQAHGLTPEQVVAIASHDGGKQALETVQRLLPVLCQAHGLTPQQVVAIASNGGGKQALETVQRLLPVLCQAHGLTPEQVVAIASHDGGKQALETVQRLLPVLCQAHGLTPEQVVAIASHDGGKQALETVQRLLPVLCQAHGLTPEQVVAIASHDGGKQALETVQRLLPVLCQAHGLTPEQVVAIASHDGGKQALETVQRLLPVLCQAHGLTPEQVVAIASHDGGKQALETVQRLLPVLCQAHGLTPQQVVAIASNGGGKQALETVQRLLPVLCQAHGLTPEQVVAIASNIGGKQALETVQALLPVLCQAHGLTPEQVVAIASHDGGKQALETVQRLLPVLCQAHGLTPQQVVAIASNGGGKQALETVQRLLPVLCQAHGLTPEQVVAIASNKGGKQALETVQRLLPVLCQAHGLTPQQVVAIASNGGGKQALETVQRLLPVLCQAHGLTPEQVVAIASNIGGKQALETVQALLPVLCQAHGLTPEQVVAIASHDGGKQALETVQRLLPVLCQAHGLTPEQVVAIASNIGGKQALETVQALLPVLCQAHGLTPEQVVAIASHDGGKQALETVQRLLPVLCQAHGLTPEQVVAIASHDGGKQALETVQRLLPVLCQAHGLTPEQVVAIASNIGGKQALETVQALLPVLCQAHGLTPQQVVAIASHDGGRPALESIVAQLSRPDP

SEQ ID NO: 140 - protein, 141 aa, Artificial sequence
  ColE7
MASGSKRNKPGKATGKGKPVNNKWLNNAGKDLGSPVPDRIANKLRDKEFKSFDDFRKKFWEEVSKDPELSKQFSRNNNDRMKVGKAPKTRTQDVSGKRTSFELHHEKPISQNGGVYDMDNISVVTPKRHIDIHRGKGSSAD

SEQ ID NO: 141 - DNA, 2217 bp, Artificial sequence
  pCLS7183 Scaffold
atggccgaccccattcgttcgcgcacaccaagtcctgcccgcgagcttctgcccggaccccaacccgatggggttcagccgactgcagatcgtggggtgtctccgcctgccggcggccccctggatggcttgccggctcggcggacgatgtcccggacccggctgccatctccccctgccccctcacctgcgttctcggcgggcagcttcagtgacctgttacgtcagttcgatccgtcactttttaatacatcgctttttgattcattgcctcccttcggcgctcaccatacagaggctgccacaggcgagtgggatgaggtgcaatcgggtctgcgggcagccgacgcccccccacccaccatgcgcgtggctgtcactgccgcgcggcccccgcgcgccaagccggcgccgcgacgacgtgctgcgcaaccctccgacgcttcgccggcggcgcaggtggatctacgcacgctcggctacagccagcagcaacaggagaagatcaaaccgaaggttcgttcgacagtggcgcagcaccacgaggcactggtcggccacgggtttacacacgcgcacatcgttgcgttaagccaacacccggcagcgttagggaccgtcgctgtcaagtatcaggacatgatcgcagcgttgccagaggcgacacacgaagcgatcgttggcgtcggcaaacagtggtccggcgcacgcgctctggaggccttgctcacggtggcgggagagttgagaggtccaccgttacagttggacacaggccaacttctcaagattgcaaaacgtggcggcgtgaccgcagtggaggcagtgcatgcatggcgcaatgcactgacgggtgccccgctcaacttgaccggagacgcccgggggatcaggtcacgtgcgtctcggagcattgttgcccagttatctcgccctgatccggcgttggccgcgttgaccaacgaccacctcgtcgccttggcctgcctcggcgggcgtcctgcgctggatgcagtgaaaaagggattgccgcacgcgccggccttgatcaaaagaaccaatcgccgtattcccgaacgcacatcccatcgcgttgccgaccacgcgcaagtggttcgcgtgctgggttttttccagtgccactcccacccagcgcaagcatttgatgacgccatgacgcagttcgggatgagcaggcacgggttgttacagctctttcgcagagtgggcgtcaccgaactcgaagcccgcagtggaacgctccccccagccagtcagcgttgggaccgtatcctccaggcatcagggatgaaaagggccaaaccgtcccctacttcaactcaaacgccggatcaggcgtctttgcatgcattcgccgattcgctggagcgtgaccttgatgcgcctagcccaatgcacgagggagatcagacgcgggcaagtagccgtaaacggtcccgatcggatcgtgctgtcaccggtccctccgcacagcaatcgttcgaggtgcgcgttcccgaacagcgcgatgcgctccatttgcccctctcctggagggtaaaacgcccgcgtaccagtatcgggggcggcctcccggatcctatcagccgttcccagctggtgaagtccgagctggaggagaagaaatccgagttgaggcacaagctgaagtacgtgccccacgagtacatcgagctgatcgagatcgcccggaacagcacccaggaccgtatcctggagatgaaggtgatggagttcttcatgaaggtgtacggctacaggggcaagcacctgggcggctccaggaagcccgacggcgccatctacaccgtgggctcccccatcgactacggcgtgatcgtggacaccaaggcctactccggcggctacaacctgcccatcggccaggccgacgaaatgcagaggtacgtggaggagaaccagaccaggaacaagcacatcaaccccaacgagtggtggaaggtgtacccctccagcgtgaccgagttcaagttcctgttcgtgtccggccacttcaagggcaactacaaggcccagctgaccaggctgaaccacatcaccaactgcaacggcgccgtgctgtccgtggaggagctcctgatcggcggcgagatgatcaaggccggcaccctgaccctggaggaggtgaggaggaagttcaacaacggcgagatcaacttcgcggccgactgataa

SEQ ID NO: 142 - DNA, 35 bp, Artificial sequence
  Primer CMP_G061
cggcggccatggtggatctacgcacgctcggctac

SEQ ID NO: 143 - DNA, 36 bp, Artificial sequence
  Primer CMP_G065
cgcggcggatcccggatcagggcgagataactgggc

SEQ ID NO: 144 - DNA, 3032 bp, Artificial sequence
  pCLS7865
gggcggagcctatggaaaaacgccagcaacgcggcctttttacggttcctggccttttgctggccttttgctcacatggtctttcctgcgttatcccctgattctgtggataaccgtattaccgcctttgagtgagctgataccgctcgccgcagccgaacgaccgagcgcagcgagtcagtgagcgaggaagcggagagcgcccaatacgcaaaccgcctctccccgcgcgttggccgattcattaatgcagctggcacgacaggtttcccgactggaaagcgggcagtgagcgcaacgcaattaatgtgagttagctcactcattaggcaccccaggctttacactttatgcttccggctcgtatgttgtgtggaattgtgagcggataacaatttcacacaggaaacagctatgaccatgattacgccaagcgcgtcaattaaccctcactaaagggaacaaaagctgttaattaagcgcgccacacgcaaacacaaatacacagcggccttgccaccatggcaaacaccggtggatcctccggaagatcttcggccgactgataagtcgaccaccaccaccaccaccactgataagagctcctcgagcctgcagcagctgaagctttggacttctggcgcgcccaattcgccctatagtgagtcgtattacgtcgcgctcactggccgtcgttttacaacgtcgtgactgggaaaaccctggcgttacccaacttaatcgccttgcagcacatccccctttcgccagctggcgtaatagcgaagaggcccgcaccgaaacgcccttcccaacagttgcgcagcctgaatggcgaatgggagcgccctgtagcggcgcattaagcgcggcgggtgtggtggttacgcgcagcgtgaccgctacacttgccagcgccctagcgcccgctcctttcgctttcttcccttcctttctcgccacgttcgccggctttccccgtcaagctctaaatcgggggctccctttagggttccgatttagtgctttacggcacctcgaccccaaaaaacttgattagggtgatggttggcctgtagtgggccatagccctgatagacggtttttcgccctttgacgttggagtccacgttctttaatagtggactcttgttccaaactggaacaacactcaaccctatctcggtctattcttttgatttataagggattttgccgatttcggcctattggttaaaaaatgagctgatttaacaaaaatttaacgcgaattttaacaaaatattaacgcttacaatttaggtggcacttttcggggaaatgtgcgcggaacccctatttgtttatttttctaaatacattcaaatatgtatccgctcatgagacaataaccctgataaatgcttcaataatattgaaaaaggaagagtatgagtattcaacatttccgtgtcgcccttattcccttttttgcggcattttgccttcctgtttttgctcacccagaaacgctggtgaaagtaaaagatgctgaagatcagttgggtgcacgagtgggttacatcgaactggatctcaacagcggtaagatccttgagagttttcgccccgaagaacgttttccaatgatgagcacttttaaagttctgctatgtggcgcggtattatcccgtattgacgccgggcaagagcaactcggtcgccgcatacactattctcagaatgacttggttgagtactcaccagtcacagaaaagcatcttacggatggcatgacagtaagagaattatgcagtgctgccataaccatgagtgataacactgcggccaacttacttctgacaacgatcggaggaccgaaggagctaaccgcttttttgcacaacatgggggatcatgtaactcgccttgatcgttgggaaccggagctgaatgaagccataccaaacgacgagcgtgacaccacgatgcctgtagcaatggcaacaacgttgcgcaaactattaactggcgaactacttactctagcttcccggcaacaattaatagactggatggaggcggataaagttgcaggaccacttctgcgctcggcccttccggctggctggtttattgctgataaatctggagccggtgagcgtggttctcgcggtatcattgcagcactggggccagatggtaagccctcccgtatcgtagttatctacacgacggggagtcaggcaactatggatgaacgaaatagacagatcgctgagataggtgcctcactgattaagcattggtaactgtcagaccaagtttactcatatatactttagattgatttaaaacttcatttttaatttaaaaggatctaggtgaagatcctttttgataatctcatgaccaaaatcccttaacgtgagttttcgttccactgagcgtcagaccccgtagaaaagatcaaaggatcttcttgagatcctttttttctgcgcgtaatctgctgcttgcaaacaaaaaaaccaccgctaccagcggtggtttgtttgccggatcaagagctaccaactctttttccgaaggtaactggcttcagcagagcgcagataccaaatactgttcttctagtgtagccgtagttaggccaccacttcaagaactctgtagcaccgcctacatacctcgctctgctaatcctgttaccagtggctgctgccagtggcgataagtcgtgtcttaccgggttggactcaagacgatagttaccggataaggcgcagcggtcgggctgaacggggggttcgtgcacacagcccagcttggagcgaacgacctacaccgaactgagatacctacagcgtgagctatgagaaagcgccacgcttcccgaagggagaaaggcggacaggtatccggtaagcggcagggtcggaacaggagagcgcacgagggagcttccagggggaaacgcctggtatctttatagtcctgtcgggtttcgccacctctgacttgagcgtcgatttttgtgatgctcgtcaggg

SEQ ID NO: 145 - DNA, 3503 bp, Artificial sequence
  pCLS9009 (pCLS7865-cTAL11_CFS1)
gggcggagcctatggaaaaacgccagcaacgcggcctttttacggttcctggccttttgctggccttttgctcacatggtctttcctgcgttatcccctgattctgtggataaccgtattaccgcctttgagtgagctgataccgctcgccgcagccgaacgaccgagcgcagcgagtcagtgagcgaggaagcggagagcgcccaatacgcaaaccgcctctccccgcgcgttggccgattcattaatgcagctggcacgacaggtttcccgactggaaagcgggcagtgagcgcaacgcaattaatgtgagttagctcactcattaggcaccccaggctttacactttatgcttccggctcgtatgttgtgtggaattgtgagcggataacaatttcacacaggaaacagctatgaccatgattacgccaagcgcgtcaattaaccctcactaaagggaacaaaagctgttaattaagcgcgccacacgcaaacacaaatacacagcggccttgccaccatggtggatctacgcacgctcggctacagccagcagcaacaggagaagatcaaaccgaaggttcgttcgacagtggcgcagcaccacgaggcactggtcggccacgggtttacacacgcgcacatcgttgcgttaagccaacacccggcagcgttagggaccgtcgctgtcaagtatcaggacatgatcgcagcgttgccagaggcgacacacgaagcgatcgttggcgtcggcaaacagtggtccggcgcacgcgctctggaggccttgctcacggtggcgggagagttgagaggtccaccgttacagttggacacaggccaacttctcaagattgcaaaacgtggcggcgtgaccgcagtggaggcagtgcatgcatggcgcaatgcactgacgggtgccccgctcaacttgaccggagacgcccgggggatcaggtcacgtgcgtctcggagcattgttgcccagttatctcgccctgatccgggatcctccggaagatcttcggccgactgataagtcgaccaccaccaccaccaccactgataagagctcctcgagcctgcagcagctgaagctttggacttctggcgcgcccaattcgccctatagtgagtcgtattacgtcgcgctcactggccgtcgttttacaacgtcgtgactgggaaaaccctggcgttacccaacttaatcgccttgcagcacatccccctttcgccagctggcgtaatagcgaagaggcccgcaccgaaacgcccttcccaacagttgcgcagcctgaatggcgaatgggagcgccctgtagcggcgcattaagcgcggcgggtgtggtggttacgcgcagcgtgaccgctacacttgccagcgccctagcgcccgctcctttcgctttcttcccttcctttctcgccacgttcgccggctttccccgtcaagctctaaatcgggggctccctttagggttccgatttagtgctttacggcacctcgaccccaaaaaacttgattagggtgatggttggcctgtagtgggccatagccctgatagacggtttttcgccctttgacgttggagtccacgttctttaatagtggactcttgttccaaactggaacaacactcaaccctatctcggtctattcttttgatttataagggattttgccgatttcggcctattggttaaaaaatgagctgatttaacaaaaatttaacgcgaattttaacaaaatattaacgcttacaatttaggtggcacttttcggggaaatgtgcgcggaacccctatttgtttatttttctaaatacattcaaatatgtatccgctcatgagacaataaccctgataaatgcttcaataatattgaaaaaggaagagtatgagtattcaacatttccgtgtcgcccttattcccttttttgcggcattttgccttcctgtttttgctcacccagaaacgctggtgaaagtaaaagatgctgaagatcagttgggtgcacgagtgggttacatcgaactggatctcaacagcggtaagatccttgagagttttcgccccgaagaacgttttccaatgatgagcacttttaaagttctgctatgtggcgcggtattatcccgtattgacgccgggcaagagcaactcggtcgccgcatacactattctcagaatgacttggttgagtactcaccagtcacagaaaagcatcttacggatggcatgacagtaagagaattatgcagtgctgccataaccatgagtgataacactgcggccaacttacttctgacaacgatcggaggaccgaaggagctaaccgcttttttgcacaacatgggggatcatgtaactcgccttgatcgttgggaaccggagctgaatgaagccataccaaacgacgagcgtgacaccacgatgcctgtagcaatggcaacaacgttgcgcaaactattaactggcgaactacttactctagcttcccggcaacaattaatagactggatggaggcggataaagttgcaggaccacttctgcgctcggcccttccggctggctggtttattgctgataaatctggagccggtgagcgtggttctcgcggtatcattgcagcactggggccagatggtaagccctcccgtatcgtagttatctacacgacggggagtcaggcaactatggatgaacgaaatagacagatcgctgagataggtgcctcactgattaagcattggtaactgtcagaccaagtttactcatatatactttagattgatttaaaacttcatttttaatttaaaaggatctaggtgaagatcctttttgataatctcatgaccaaaatcccttaacgtgagttttcgttccactgagcgtcagaccccgtagaaaagatcaaaggatcttcttgagatcctttttttctgcgcgtaatctgctgcttgcaaacaaaaaaaccaccgctaccagcggtggtttgtttgccggatcaagagctaccaactctttttccgaaggtaactggcttcagcagagcgcagataccaaatactgttcttctagtgtagccgtagttaggccaccacttcaagaactctgtagcaccgcctacatacctcgctctgctaatcctgttaccagtggctgctgccagtggcgataagtcgtgtcttaccgggttggactcaagacgatagttaccggataaggcgcagcggtcgggctgaacggggggttcgtgcacacagcccagcttggagcgaacgacctacaccgaactgagatacctacagcgtgagctatgagaaagcgccacgcttcccgaagggagaaaggcggacaggtatccggtaagcggcagggtcggaacaggagagcgcacgagggagcttccagggggaaacgcctggtatctttatagtcctgtcgggtttcgccacctctgacttgagcgtcgatttttgtgatgctcgtcaggg

SEQ ID NO: 146 - DNA, 9402 bp, Artificial sequence
  pCLS6614
ttccataggctccgcccccctgacgagcatcacaaaaatcgacgctcaagtcagaggtggcgaaacccgacaggactataaagataccaggcgtttccccctggaagctccctcgtgcgctctcctgttccgaccctgccgcttaccggatacctgtccgcctttctcccttcgggaagcgtggcgctttctcatagctcacgctgtaggtatctcagttcggtgtaggtcgttcgctccaagctgggctgtgtgcacgaaccccccgttcagcccgaccgctgcgccttatccggtaactatcgtcttgagtccaacccggtaagacacgacttatcgccactggcagcagccactggtaacaggattagcagagcgaggtatgtaggcggtgctacagagttcttgaagtggtggcctaactacggctacactagaaggacagtatttggtatctgcgctctgctgaagccagttaccttcggaaaaagagttggtagctcttgatccggcaaacaaaccaccgctggtagcggtggtttttttgtttgcaagcagcagattacgcgcagaaaaaaaggatctcaagaagatcctttgatcttttctacggggtctgacgctcagtggaacgaaaactcacgttaagggattttggtcatgagattatcaaaaaggatcttcacctagatccttttaaattaaaaatgaagttttaaatcaatctaaagtatatatgagtaaacttggtctgacagttaccaatgcttaatcagtgaggcacctatctcagcgatctgtctatttcgttcatccatagttgcctgactccccgtcgtgtagataactacgatacgggagggcttaccatctggccccagtgctgcaatgataccgcgagacccacgctcaccggctccagatttatcagcaataaaccagccagccggaagggccgagcgcagaagtggtcctgcaactttatccgcctccatccagtctattaattgttgccgggaagctagagtaagtagttcgccagttaatagtttgcgcaacgttgttgccattgctacaggcatcgtggtgtcacgctcgtcgtttggtatggcttcattcagctccggttcccaacgatcaaggcgagttacatgatcccccatgttgtgcaaaaaagcggttagctccttcggtcctccgatcgttgtcagaagtaagttggccgcagtgttatcactcatggttatggcagcactgcataattctcttactgtcatgccatccgtaagatgcttttctgtgactggtgagtactcaaccaagtcattctgagaatagtgtatgcggcgaccgagttgctcttgcccggcgtcaatacgggataataccgcgccacatagcagaactttaaaagtgctcatcattggaaaacgttcttcggggcgaaaactctcaaggatcttaccgctgttgagatccagttcgatgtaacccactcgtgcacccaactgatcttcagcatcttttactttcaccagcgtttctgggtgagcaaaaacaggaaggcaaaatgccgcaaaaaagggaataagggcgacacggaaatgttgaatactcatactcttcctttttcaatattattgaagcatttatcagggttattgtctcatgagcggatacatatttgaatgtatttagaaaaataaacaaataggggttccgcgcacatttccccgaaaagtgccacctgacgtccgatcaaaaatcatcgcttcgctgattaattaccccagaaataaggctaaaaaactaatcgcattatcatcctatggttgttaatttgattcgttcatttgaaggtttgtggggccaggttactgccaatttttcctcttcataaccataaaagctagtattgtagaatctttattgttcggagcagtgcggcgcgaggcacatctgcgtttcaggaacgcgaccggtgaagacgaggacgcacggaggagagtcttccttcggagggctgtcacccgctcggcggcttctaatccgtacttcaatatagcaatgagcagttaagcgtattactgaaagttccaaagagaaggtttttttaggctaatcgacctcgagcagatccgccaggcgtgtatatagcgtggatggccaggcaactttagtgctgacacatacaggcatatatatatgtgtgcgacgacacatgatcatatggcatgcatgtgctctgtatgtatataaaactcttgttttcttcttttctctaaatattctttccttatacattaggtcctttgtagcataaattactatacttctatagacacgcaaacacaaatacacagcggccttgccaccatggccaagtctggcatctaccagattaagaacaccctgaataacaaagtgtatgttggatctgccaaggactttgagaaaagatggaagaggcacttcaaggatctggaaaagggttgccacagctccatcaagctccaaaggtctttcaacaaacatggcaatgtctttgagtgctccattttggaagagatcccttatgaaaaggacctcattatagagagggaaaacttctggatcaaggagctgaactcaaaaatcaatggatacaacattgcagatgccacatttggtgacacctgttctactcacccccttaaggaagagatcattaaaaagaggtctgagactgtgaaggctaagatgttgaaactggggcctgatggcagaaaggcactctactctaagccaggtagcaaaaatggaaggtggaaccctgagacccacaagttctgcaaatgtggggtgagaatacagacatcagcctacacttgcagcaagtgtaggaacagatcaggagagaataactcctttttcaaccacaagcattctgacatcaccaagtccaaaatttcaggcaagatgaaaggtcaaggtccatctggcaataccaaatataacaaagagttcctgctgtacctggccggctttgtggacggtaacggtagcatcatcgctcagattaaaccaaaccagtcttataagtttaaacatcagctaagcttgacctttcaggtgactcaaaagacccagcgccgttggtttctggacaaactagtggatgaaattggcgttggttacgtacgtgatcgcggatccgtttccgattacattttaagcgaaatcaagccgctgcacaacttcctgactcaactgcagccgtttctgaaactgaaacagaaacaggcaaacctggttctgaaaattatcgaacagctgccgtctgcaaaagaatccccggacaaattcctggaagtttgtacctgggtggatcagattgcagctctgaacgattctaagacgcgtaaaaccacttctgaaaccgttcgtgctgtgctggacagcctgagcgagaagaagaaatcctccccggcggccgactgataactcgagcgatcctctagacgagctcctcgagcctgcagcagctgaagctttggacttcttcgccagaggtttggtcaagtctccaatcaaggttgtcggcttgtctaccttgccagaaatttacgaaaagatggaaaagggtcaaatcgttggtagatacgttgttgacacttctaaataagcgaatttcttatgatttatgatttttattattaaataagttataaaaaaaataagtgtatacaaattttaaagtgactcttaggttttaaaacgaaaattcttattcttgagtaactctttcctgtaggtcaggttgctttctcaggtatagcatgaggtcgctcttattgaccacacctctaccggcatgcaagcttggcgtaatcatggtcatagctgtttcctgtgtgaaattgttatccgctcacaattccacacaacatacgagccggaagcataaagtgtaaagcctggggtgcctaatgagtgagctaactcacattaattgcgttgcgctcactgcccgctttccagtcgggaaacctgtcgtgccagcagatctattacattatgggtggtatgttggaataaaaatcaactatcatctactaactagtatttacgttactagtatattatcatatacggtgttagaagatgacgcaaatgatgagaaatagtcatctaaattagtggaagctgaaacgcaaggattgataatgtaataggatcaatgaatattaacatataaaatgatgataataatatttatagaattgtgtagaattgcagattcccttttatggattcctaaatcctcgaggagaacttctagtatatctacatacctaatattattgccttattaaaaatggaatcccaacaattacatcaaaatccacattctcttcaaaatcaattgtcctgtacttccttgttcatgtgtgttcaaaaacgttatatttataggataattatactctatttctcaacaagtaattggttgtttggccgagcggtctaaggcgcctgattcaagaaatatcttgaccgcagttaactgtgggaatactcaggtatcgtaagatgcaagagttcgaatctcttagcaaccattatttttttcctcaacataacgagaacacacaggggcgctatcgcacagaatcaaattcgatgactggaaattttttgttaatttcagaggtcgcctgacgcatatacctttttcaactgaaaaattgggagaaaaaggaaaggtgagagccgcggaaccggcttttcatatagaatagagaagcgttcatgactaaatgcttgcatcacaatacttgaagttgacaatattatttaaggacctattgttttttccaataggtggttagcaatcgtcttactttctaacttttcttaccttttacatttcagcaatatatatatatatatttcaaggatataccattctaatgtctgcccctaagaagatcgtcgttttgccaggtgaccacgttggtcaagaaatcacagccgaagccattaaggttcttaaagctatttctgatgttcgttccaatgtcaagttcgatttcgaaaatcatttaattggtggtgctgctatcgatgctacaggtgtcccacttccagatgaggcgctggaagcctccaagaaggttgatgccgttttgttaggtgctgtgggtggtcctaaatggggtaccggtagtgttagacctgaacaaggtttactaaaaatccgtaaagaacttcaattgtacgccaacttaagaccatgtaactttgcatccgactctcttttagacttatctccaatcaagccacaatttgctaaaggtactgacttcgttgttgtcagagaattagtgggaggtatttactttggtaagagaaaggaagacgatggtgatggtgtcgcttgggatagtgaacaatacaccgttccagaagtgcaaagaatcacaagaatggccgctttcatggccctacaacatgagccaccattgcctatttggtccttggataaagctaatgttttggcctcttcaagattatggagaaaaactgtggaggaaaccatcaagaacgaattccctacattgaaggttcaacatcaattgattgattctgccgccatgatcctagttaagaacccaacccacctaaatggtattataatcaccagcaacatgtttggtgatatcatctccgatgaagcctccgttatcccaggttccttgggtttgttgccatctgcgtccttggcctctttgccagacaagaacaccgcatttggtttgtacgaaccatgccacggttctgctccagatttgccaaagaataaggtcaaccctatcgccactatcttgtctgctgcaatgatgttgaaattgtcattgaacttgcctgaagaaggtaaggccattgaagatgcagttaaaaaggttttggatgcaggtatcagaactggtgatttaggtggttccaacagtaccacggaagtcggtgatgctgtcgccgaagaagttaagaaaatccttgcttaaaaagattctctttttttatgatatttgtacataaactttataaatgaaattcataatagaaacgacacgaaattacaaaatggaatatgttcatagggtagacgaaactatatacgcaatctacatacatttatcaagaaggagaaaaaggaggatgtaaaggaatacaggtaagcaaattgatactaatggctcaacgtgataaggaaaaagaattgcactttaacattaatattgacaaggaggagggcaccacacaaaaagttaggtgtaacagaaaatcatgaaactatgattcctaatttatatattggaggattttctctaaaaaaaaaaaaatacaacaaataaaaaacactcaatgacctgaccatttgatggagtttaagtcaataccttcttgaaccatttcccataatggtgaaagttccctcaagaattttactctgtcagaaacggccttaacgacgtagtcgacctcctcttcagtactaaatctaccaataccaaatctgatggaagaatgggctaatgcatcatccttacccagcgcatgtaaaacataagaaggttctagggaagcagatgtacaggctgaacccgaggataatgcgatatcccttagtgccatcaataaagattctccttccacgtaggcgaaagaaacgttaacacaccctggataacgatgatctggagatccgttcaacgtggtatgttcagcggataatagacctttgactaatttatcggatagtcttttgatgtgagcttggtcgttgtcaaattctttcttcatcaatctcgcagcttcaccaaatcccgctaccaatgggggggccaaagtaccagatctgctgcattaatgaatcggccaacgcgcggggagaggcggtttgcgtattgggcgctcttccgcttcctcgctcactgactcgctgcgctcggtcgttcggctgcggcgagcggtatcagcatcgatgaattccacggactatagactatactagtatactccgtctactgtacgatacacttccgctcaggtccttgtcctttaacgaggccttaccactcttttgttactctattgatccagctcagcaaaggcagtgtgatctaagattctatcttcgcgatgtagtaaaactagctagaccgagaaagagactagaaatgcaaaaggcacttctacaatggctgccatcattattatccgatgtgacgctgcagcttctcaatgatattcgaatacgctttgaggagatacagcctaatatccgacaaactgttttacagatttacgatcgtacttgttacccatcattgaattttgaacatccgaacctgggagttttccctgaaacagatagtatatttgaacctgtataataatatatagtctagcgctttacggaagacaatgtatgtatttcggttcctggagaaactattgcatctattgcataggtaatcttgcacgtcgcatccccggttcattttctgcgtttccatcttgcacttcaatagcatatctttgttaacgaagcatctgtgcttcattttgtagaacaaaaatgcaacgcgagagcgctaatttttcaaacaaagaatctgagctgcatttttacagaacagaaatgcaacgcgaaagcgctattttaccaacgaagaatctgtgcttcatttttgtaaaacaaaaatgcaacgcgagagcgctaatttttcaaacaaagaatctgagctgcatttttacagaacagaaatgcaacgcgagagcgctattttaccaacaaagaatctatacttcttttttgttctacaaaaatgcatcccgagagcgctatttttctaacaaagcatcttagattactttttttctcctttgtgcgctctataatgcagtctcttgataactttttgcactgtaggtccgttaaggttagaagaaggctactttggtgtctattttctcttccataaaaaaagcctgactccacttcccgcgtttactgattactagcgaagctgcgggtgcattttttcaagataaaggcatccccgattatattctataccgatgtggattgcgcatactttgtgaacagaaagtgatagcgttgatgattcttcattggtcagaaaattatgaacggtttcttctattttgtctctatatactacgtataggaaatgtttacattttcgtattgttttcgattcactctatgaatagttcttactacaatttttttgtctaaagagtaatactagagataaacataaaaaatgtagaggtcgagtttagatgcaagttcaaggagcgaaaggtggatgggtaggttatatagggatatagcacagagatatatagcaaagagatacttttgagcaatgtttgtggaagcggtattcgcaatattttagtagctcgttacagtccggtgcgtttttggttttttgaaagtgcgtcttcagagcgcttttggttttcaaaagcgctctgaagttcctatactttctagagaataggaacttcggaataggaacttcaaagcgtttccgaaaacgagcgcttccgaaaatgcaacgcgagctgcgcacatacagctcactgttcacgtcgcacctatatctgcgtgttgcctgtatatatatatacatgagaagaacggcatagtgcgtgtttatgcttaaatgcgtacttatatgcgtctatttatgtaggatgaaaggtagtctagtacctcctgtgatattatcccattccatgcggggtatcgtatgcttccttcagcactaccctttagctgttctatatgctgccactcctcaattggattagtctcatccttcaatgctatcatttcctttgatattggatcatatgcatagtaccgagaaactagtgcgaagtagtgatcaggtattgctgttatctgatgagtatacgttgtcctggccacggcagaagcacgcttatcgctccaatttcccacaacattagtcaactccgttaggcccttcattgaaagaaatgaggtcatcaaatgtcttccaatgtgagattttgggccattttttatagcaaagattgaataaggcgcatttttcttcaaagctttattgtacgatctgactaagttatcttttaataattggtattcctgtttattgcttgaagaattgccggtcctatttactcgttttaggactggttcagaattcatcgatgctcactcaaaggtcggtaatacggttatccacagaatcaggggataacgcaggaaagaacatgtgagcaaaaggccagcaaaaggccaggaaccgtaaaaaggccgcgttgctggcgttt

SEQ ID NO: 147 - DNA, 36 bp, Artificial sequence
  Primer CMP_G069
gccaccggatccaagtctggcatctaccagattaag

SEQ ID NO: 148 - DNA, 35 bp, Artificial sequence
  Primer CMP_G070
tggtatcggccgatggaccttgacctttcatcttg

SEQ ID NO: 149 - DNA, 35 bp, Artificial sequence
  Primer CMP_G071
tggtatcggccgatggaccttgagaatgcttgtgg

SEQ ID NO: 150 - DNA, 4085 bp, Artificial sequence
  pCLS9010 (pCLS 7865-cT11 TevD01)
gggcggagcctatggaaaaacgccagcaacgcggcctttttacggttcctggccttttgctggccttttgctcacatggtctttcctgcgttatcccctgattctgtggataaccgtattaccgcctttgagtgagctgataccgctcgccgcagccgaacgaccgagcgcagcgagtcagtgagcgaggaagcggagagcgcccaatacgcaaaccgcctctccccgcgcgttggccgattcattaatgcagctggcacgacaggtttcccgactggaaagcgggcagtgagcgcaacgcaattaatgtgagttagctcactcattaggcaccccaggctttacactttatgcttccggctcgtatgttgtgtggaattgtgagcggataacaatttcacacaggaaacagctatgaccatgattacgccaagcgcgtcaattaaccctcactaaagggaacaaaagctgttaattaagcgcgccacacgcaaacacaaatacacagcggccttgccaccatggtggatctacgcacgctcggctacagccagcagcaacaggagaagatcaaaccgaaggttcgttcgacagtggcgcagcaccacgaggcactggtcggccacgggtttacacacgcgcacatcgttgcgttaagccaacacccggcagcgttagggaccgtcgctgtcaagtatcaggacatgatcgcagcgttgccagaggcgacacacgaagcgatcgttggcgtcggcaaacagtggtccggcgcacgcgctctggaggccttgctcacggtggcgggagagttgagaggtccaccgttacagttggacacaggccaacttctcaagattgcaaaacgtggcggcgtgaccgcagtggaggcagtgcatgcatggcgcaatgcactgacgggtgccccgctcaacttgaccggagacgcccgggggatcaggtcacgtgcgtctcggagcattgttgcccagttatctcgccctgatccgggatccaagtctggcatctaccagattaagaacaccctgaataacaaagtgtatgttggatctgccaaggactttgagaaaagatggaagaggcacttcaaggatctggaaaagggttgccacagctccatcaagctccaaaggtctttcaacaaacatggcaatgtctttgagtgctccattttggaagagatcccttatgaaaaggacctcattatagagagggaaaacttctggatcaaggagctgaactcaaaaatcaatggatacaacattgcagatgccacatttggtgacacctgttctactcacccccttaaggaagagatcattaaaaagaggtctgagactgtgaaggctaagatgttgaaactggggcctgatggcagaaaggcactctactctaagccaggtagcaaaaatggaaggtggaaccctgagacccacaagttctgcaaatgtggggtgagaatacagacatcagcctacacttgcagcaagtgtaggaacagatcaggagagaataactcctttttcaaccacaagcattctgacatcaccaagtccaaaatttcaggcaagatgaaaggtcaaggtccatcggccgactgataagtcgaccaccaccaccaccaccactgataagagctcctcgagcctgcagcagctgaagctttggacttctggcgcgcccaattcgccctatagtgagtcgtattacgtcgcgctcactggccgtcgttttacaacgtcgtgactgggaaaaccctggcgttacccaacttaatcgccttgcagcacatccccctttcgccagctggcgtaatagcgaagaggcccgcaccgaaacgcccttcccaacagttgcgcagcctgaatggcgaatgggagcgccctgtagcggcgcattaagcgcggcgggtgtggtggttacgcgcagcgtgaccgctacacttgccagcgccctagcgcccgctcctttcgctttcttcccttcctttctcgccacgttcgccggctttccccgtcaagctctaaatcgggggctccctttagggttccgatttagtgctttacggcacctcgaccccaaaaaacttgattagggtgatggttggcctgtagtgggccatagccctgatagacggtttttcgccctttgacgttggagtccacgttctttaatagtggactcttgttccaaactggaacaacactcaaccctatctcggtctattcttttgatttataagggattttgccgatttcggcctattggttaaaaaatgagctgatttaacaaaaatttaacgcgaattttaacaaaatattaacgcttacaatttaggtggcacttttcggggaaatgtgcgcggaacccctatttgtttatttttctaaatacattcaaatatgtatccgctcatgagacaataaccctgataaatgcttcaataatattgaaaaaggaagagtatgagtattcaacatttccgtgtcgcccttattcccttttttgcggcattttgccttcctgtttttgctcacccagaaacgctggtgaaagtaaaagatgctgaagatcagttgggtgcacgagtgggttacatcgaactggatctcaacagcggtaagatccttgagagttttcgccccgaagaacgttttccaatgatgagcacttttaaagttctgctatgtggcgcggtattatcccgtattgacgccgggcaagagcaactcggtcgccgcatacactattctcagaatgacttggttgagtactcaccagtcacagaaaagcatcttacggatggcatgacagtaagagaattatgcagtgctgccataaccatgagtgataacactgcggccaacttacttctgacaacgatcggaggaccgaaggagctaaccgcttttttgcacaacatgggggatcatgtaactcgccttgatcgttgggaaccggagctgaatgaagccataccaaacgacgagcgtgacaccacgatgcctgtagcaatggcaacaacgttgcgcaaactattaactggcgaactacttactctagcttcccggcaacaattaatagactggatggaggcggataaagttgcaggaccacttctgcgctcggcccttccggctggctggtttattgctgataaatctggagccggtgagcgtggttctcgcggtatcattgcagcactggggccagatggtaagccctcccgtatcgtagttatctacacgacggggagtcaggcaactatggatgaacgaaatagacagatcgctgagataggtgcctcactgattaagcattggtaactgtcagaccaagtttactcatatatactttagattgatttaaaacttcatttttaatttaaaaggatctaggtgaagatcctttttgataatctcatgaccaaaatcccttaacgtgagttttcgttccactgagcgtcagaccccgtagaaaagatcaaaggatcttcttgagatcctttttttctgcgcgtaatctgctgcttgcaaacaaaaaaaccaccgctaccagcggtggtttgtttgccggatcaagagctaccaactctttttccgaaggtaactggcttcagcagagcgcagataccaaatactgttcttctagtgtagccgtagttaggccaccacttcaagaactctgtagcaccgcctacatacctcgctctgctaatcctgttaccagtggctgctgccagtggcgataagtcgtgtcttaccgggttggactcaagacgatagttaccggataaggcgcagcggtcgggctgaacggggggttcgtgcacacagcccagcttggagcgaacgacctacaccgaactgagatacctacagcgtgagctatgagaaagcgccacgcttcccgaagggagaaaggcggacaggtatccggtaagcggcagggtcggaacaggagagcgcacgagggagcttccagggggaaacgcctggtatctttatagtcctgtcgggtttcgccacctctgacttgagcgtcgatttttgtgatgctcgtcaggg

SEQ ID NO: 151 - DNA, 4046 bp, Artificial sequence
  pCLS9011 (pCLS 7865-cT11 TevD02)
gggcggagcctatggaaaaacgccagcaacgcggcctttttacggttcctggccttttgctggccttttgctcacatggtctttcctgcgttatcccctgattctgtggataaccgtattaccgcctttgagtgagctgataccgctcgccgcagccgaacgaccgagcgcagcgagtcagtgagcgaggaagcggagagcgcccaatacgcaaaccgcctctccccgcgcgttggccgattcattaatgcagctggcacgacaggtttcccgactggaaagcgggcagtgagcgcaacgcaattaatgtgagttagctcactcattaggcaccccaggctttacactttatgcttccggctcgtatgttgtgtggaattgtgagcggataacaatttcacacaggaaacagctatgaccatgattacgccaagcgcgtcaattaaccctcactaaagggaacaaaagctgttaattaagcgcgccacacgcaaacacaaatacacagcggccttgccaccatggtggatctacgcacgctcggctacagccagcagcaacaggagaagatcaaaccgaaggttcgttcgacagtggcgcagcaccacgaggcactggtcggccacgggtttacacacgcgcacatcgttgcgttaagccaacacccggcagcgttagggaccgtcgctgtcaagtatcaggacatgatcgcagcgttgccagaggcgacacacgaagcgatcgttggcgtcggcaaacagtggtccggcgcacgcgctctggaggccttgctcacggtggcgggagagttgagaggtccaccgttacagttggacacaggccaacttctcaagattgcaaaacgtggcggcgtgaccgcagtggaggcagtgcatgcatggcgcaatgcactgacgggtgccccgctcaacttgaccggagacgcccgggggatcaggtcacgtgcgtctcggagcattgttgcccagttatctcgccctgatccgggatccaagtctggcatctaccagattaagaacaccctgaataacaaagtgtatgttggatctgccaaggactttgagaaaagatggaagaggcacttcaaggatctggaaaagggttgccacagctccatcaagctccaaaggtctttcaacaaacatggcaatgtctttgagtgctccattttggaagagatcccttatgaaaaggacctcattatagagagggaaaacttctggatcaaggagctgaactcaaaaatcaatggatacaacattgcagatgccacatttggtgacacctgttctactcacccccttaaggaagagatcattaaaaagaggtctgagactgtgaaggctaagatgttgaaactggggcctgatggcagaaaggcactctactctaagccaggtagcaaaaatggaaggtggaaccctgagacccacaagttctgcaaatgtggggtgagaatacagacatcagcctacacttgcagcaagtgtaggaacagatcaggagagaataactcctttttcaaccacaagcattctcaaggtccatcggccgactgataagtcgaccaccaccaccaccaccactgataagagctcctcgagcctgcagcagctgaagctttggacttctggcgcgcccaattcgccctatagtgagtcgtattacgtcgcgctcactggccgtcgttttacaacgtcgtgactgggaaaaccctggcgttacccaacttaatcgccttgcagcacatccccctttcgccagctggcgtaatagcgaagaggcccgcaccgaaacgcccttcccaacagttgcgcagcctgaatggcgaatgggagcgccctgtagcggcgcattaagcgcggcgggtgtggtggttacgcgcagcgtgaccgctacacttgccagcgccctagcgcccgctcctttcgctttcttcccttcctttctcgccacgttcgccggctttccccgtcaagctctaaatcgggggctccctttagggttccgatttagtgctttacggcacctcgaccccaaaaaacttgattagggtgatggttggcctgtagtgggccatagccctgatagacggtttttcgccctttgacgttggagtccacgttctttaatagtggactcttgttccaaactggaacaacactcaaccctatctcggtctattcttttgatttataagggattttgccgatttcggcctattggttaaaaaatgagctgatttaacaaaaatttaacgcgaattttaacaaaatattaacgcttacaatttaggtggcacttttcggggaaatgtgcgcggaacccctatttgtttatttttctaaatacattcaaatatgtatccgctcatgagacaataaccctgataaatgcttcaataatattgaaaaaggaagagtatgagtattcaacatttccgtgtcgcccttattcccttttttgcggcattttgccttcctgtttttgctcacccagaaacgctggtgaaagtaaaagatgctgaagatcagttgggtgcacgagtgggttacatcgaactggatctcaacagcggtaagatccttgagagttttcgccccgaagaacgttttccaatgatgagcacttttaaagttctgctatgtggcgcggtattatcccgtattgacgccgggcaagagcaactcggtcgccgcatacactattctcagaatgacttggttgagtactcaccagtcacagaaaagcatcttacggatggcatgacagtaagagaattatgcagtgctgccataaccatgagtgataacactgcggccaacttacttctgacaacgatcggaggaccgaaggagctaaccgcttttttgcacaacatgggggatcatgtaactcgccttgatcgttgggaaccggagctgaatgaagccataccaaacgacgagcgtgacaccacgatgcctgtagcaatggcaacaacgttgcgcaaactattaactggcgaactacttactctagcttcccggcaacaattaatagactggatggaggcggataaagttgcaggaccacttctgcgctcggcccttccggctggctggtttattgctgataaatctggagccggtgagcgtggttctcgcggtatcattgcagcactggggccagatggtaagccctcccgtatcgtagttatctacacgacggggagtcaggcaactatggatgaacgaaatagacagatcgctgagataggtgcctcactgattaagcattggtaactgtcagaccaagtttactcatatatactttagattgatttaaaacttcatttttaatttaaaaggatctaggtgaagatcctttttgataatctcatgaccaaaatcccttaacgtgagttttcgttccactgagcgtcagaccccgtagaaaagatcaaaggatcttcttgagatcctttttttctgcgcgtaatctgctgcttgcaaacaaaaaaaccaccgctaccagcggtggtttgtttgccggatcaagagctaccaactctttttccgaaggtaactggcttcagcagagcgcagataccaaatactgttcttctagtgtagccgtagttaggccaccacttcaagaactctgtagcaccgcctacatacctcgctctgctaatcctgttaccagtggctgctgccagtggcgataagtcgtgtcttaccgggttggactcaagacgatagttaccggataaggcgcagcggtcgggctgaacggggggttcgtgcacacagcccagcttggagcgaacgacctacaccgaactgagatacctacagcgtgagctatgagaaagcgccacgcttcccgaagggagaaaggcggacaggtatccggtaagcggcagggtcggaacaggagagcgcacgagggagcttccagggggaaacgcctggtatctttatagtcctgtcgggtttcgccacctctgacttgagcgtcgatttttgtgatgctcgtcaggg

SEQ ID NO: 152 - protein, 598 aa, Artificial sequence
  RVDs AvrBs3
LTPEQVVAIASHDGGKQALETVQRLLPVLCQAHGLTPQQVVAIASNGGGKQALETVQRLLPVLCQAHGLTPEQVVAIASNIGGKQALETVQALLPVLCQAHGLTPQQVVAIASNGGGKQALETVQRLLPVLCQAHGLTPEQVVAIASNIGGKQALETVQALLPVLCQAHGLTPEQVVAIASNIGGKQALETVQALLPVLCQAHGLTPEQVVAIASNIGGKQALETVQALLPVLCQAHGLTPEQVVAIASHDGGKQALETVQRLLPVLCQAHGLTPEQVVAIASHDGGKQALETVQRLLPVLCQAHGLTPQQVVAIASNGGGKQALETVQRLLPVLCQAHGLTPEQVVAIASNIGGKQALETVQALLPVLCQAHGLTPEQVVAIASNIGGKQALETVQALLPVLCQAHGLTPEQVVAIASHDGGKQALETVQRLLPVLCQAHGLTPEQVVAIASHDGGKQALETVQRLLPVLCQAHGLTPEQVVAIASHDGGKQALETVQRLLPVLCQAHGLTPQQVVAIASNGGGKQALETVQRLLPVLCQAHGLTPEQVVAIASHDGGKQALETVQRLLPVLCQAHGLTPQQVVAIASNGGGRPALE

SEQ ID NO: 153 - DNA, 5798 bp, Artificial sequence
  pCLS9013
gggcggagcctatggaaaaacgccagcaacgcggcctttttacggttcctggccttttgctggccttttgctcacatggtctttcctgcgttatcccctgattctgtggataaccgtattaccgcctttgagtgagctgataccgctcgccgcagccgaacgaccgagcgcagcgagtcagtgagcgaggaagcggagagcgcccaatacgcaaaccgcctctccccgcgcgttggccgattcattaatgcagctggcacgacaggtttcccgactggaaagcgggcagtgagcgcaacgcaattaatgtgagttagctcactcattaggcaccccaggctttacactttatgcttccggctcgtatgttgtgtggaattgtgagcggataacaatttcacacaggaaacagctatgaccatgattacgccaagcgcgtcaattaaccctcactaaagggaacaaaagctgttaattaagcgcgccacacgcaaacacaaatacacagcggccttgccaccatggtggatctacgcacgctcggctacagccagcagcaacaggagaagatcaaaccgaaggttcgttcgacagtggcgcagcaccacgaggcactggtcggccacgggtttacacacgcgcacatcgttgcgttaagccaacacccggcagcgttagggaccgtcgctgtcaagtatcaggacatgatcgcagcgttgccagaggcgacacacgaagcgatcgttggcgtcggcaaacagtggtccggcgcacgcgctctggaggccttgctcacggtggcgggagagttgagaggtccaccgttacagttggacacaggccaacttctcaagattgcaaaacgtggcggcgtgaccgcagtggaggcagtgcatgcatggcgcaatgcactgacgggtgccccgctcaacttgaccccggagcaggtggtggccatcgccagccacgatggcggcaagcaggcgctggagacggtccagcggctgttgccggtgctgtgccaggcccacggcttgaccccccagcaggtggtggccatcgccagcaatggcggtggcaagcaggcgctggagacggtccagcggctgttgccggtgctgtgccaggcccacggcttgaccccggagcaggtggtggccatcgccagcaatattggtggcaagcaggcgctggagacggtgcaggcgctgttgccggtgctgtgccaggcccacggcttgaccccccagcaggtggtggccatcgccagcaatggcggtggcaagcaggcgctggagacggtccagcggctgttgccggtgctgtgccaggcccacggcttgaccccggagcaggtggtggccatcgccagcaatattggtggcaagcaggcgctggagacggtgcaggcgctgttgccggtgctgtgccaggcccacggcttgaccccggagcaggtggtggccatcgccagcaatattggtggcaagcaggcgctggagacggtgcaggcgctgttgccggtgctgtgccaggcccacggcttgaccccggagcaggtggtggccatcgccagcaatattggtggcaagcaggcgctggagacggtgcaggcgctgttgccggtgctgtgccaggcccacggcttgaccccggagcaggtggtggccatcgccagccacgatggcggcaagcaggcgctggagacggtccagcggctgttgccggtgctgtgccaggcccacggcttgaccccggagcaggtggtggccatcgccagccacgatggcggcaagcaggcgctggagacggtccagcggctgttgccggtgctgtgccaggcccacggcttgaccccccagcaggtggtggccatcgccagcaatggcggtggcaagcaggcgctggagacggtccagcggctgttgccggtgctgtgccaggcccacggcttgaccccggagcaggtggtggccatcgccagcaatattggtggcaagcaggcgctggagacggtgcaggcgctgttgccggtgctgtgccaggcccacggcttgaccccggagcaggtggtggccatcgccagcaatattggtggcaagcaggcgctggagacggtgcaggcgctgttgccggtgctgtgccaggcccacggcttgaccccggagcaggtggtggccatcgccagccacgatggcggcaagcaggcgctggagacggtccagcggctgttgccggtgctgtgccaggcccacggcttgaccccggagcaggtggtggccatcgccagccacgatggcggcaagcaggcgctggagacggtccagcggctgttgccggtgctgtgccaggcccacggcttgaccccggagcaggtggtggccatcgccagccacgatggcggcaagcaggcgctggagacggtccagcggctgttgccggtgctgtgccaggcccacggcttgaccccccagcaggtggtggccatcgccagcaatggcggtggcaagcaggcgctggagacggtccagcggctgttgccggtgctgtgccaggcccacggcttgaccccggagcaggtggtggccatcgccagccacgatggcggcaagcaggcgctggagacggtccagcggctgttgccggtgctgtgccaggcccacggcttgacccctcagcaggtggtggccatcgccagcaatggcggcggcaggccggcgctggagagcattgttgcccagttatctcgccctgatccgggatccaagtctggcatctaccagattaagaacaccctgaataacaaagtgtatgttggatctgccaaggactttgagaaaagatggaagaggcacttcaaggatctggaaaagggttgccacagctccatcaagctccaaaggtctttcaacaaacatggcaatgtctttgagtgctccattttggaagagatcccttatgaaaaggacctcattatagagagggaaaacttctggatcaaggagctgaactcaaaaatcaatggatacaacattgcagatgccacatttggtgacacctgttctactcacccccttaaggaagagatcattaaaaagaggtctgagactgtgaaggctaagatgttgaaactggggcctgatggcagaaaggcactctactctaagccaggtagcaaaaatggaaggtggaaccctgagacccacaagttctgcaaatgtggggtgagaatacagacatcagcctacacttgcagcaagtgtaggaacagatcaggagagaataactcctttttcaaccacaagcattctcaaggtccatcggccgactgataagtcgaccaccaccaccaccaccactgataagagctcctcgagcctgcagcagctgaagctttggacttctggcgcgcccaattcgccctatagtgagtcgtattacgtcgcgctcactggccgtcgttttacaacgtcgtgactgggaaaaccctggcgttacccaacttaatcgccttgcagcacatccccctttcgccagctggcgtaatagcgaagaggcccgcaccgaaacgcccttcccaacagttgcgcagcctgaatggcgaatgggagcgccctgtagcggcgcattaagcgcggcgggtgtggtggttacgcgcagcgtgaccgctacacttgccagcgccctagcgcccgctcctttcgctttcttcccttcctttctcgccacgttcgccggctttccccgtcaagctctaaatcgggggctccctttagggttccgatttagtgctttacggcacctcgaccccaaaaaacttgattagggtgatggttggcctgtagtgggccatagccctgatagacggtttttcgccctttgacgttggagtccacgttctttaatagtggactcttgttccaaactggaacaacactcaaccctatctcggtctattcttttgatttataagggattttgccgatttcggcctattggttaaaaaatgagctgatttaacaaaaatttaacgcgaattttaacaaaatattaacgcttacaatttaggtggcacttttcggggaaatgtgcgcggaacccctatttgtttatttttctaaatacattcaaatatgtatccgctcatgagacaataaccctgataaatgcttcaataatattgaaaaaggaagagtatgagtattcaacatttccgtgtcgcccttattcccttttttgcggcattttgccttcctgtttttgctcacccagaaacgctggtgaaagtaaaagatgctgaagatcagttgggtgcacgagtgggttacatcgaactggatctcaacagcggtaagatccttgagagttttcgccccgaagaacgttttccaatgatgagcacttttaaagttctgctatgtggcgcggtattatcccgtattgacgccgggcaagagcaactcggtcgccgcatacactattctcagaatgacttggttgagtactcaccagtcacagaaaagcatcttacggatggcatgacagtaagagaattatgcagtgctgccataaccatgagtgataacactgcggccaacttacttctgacaacgatcggaggaccgaaggagctaaccgcttttttgcacaacatgggggatcatgtaactcgccttgatcgttgggaaccggagctgaatgaagccataccaaacgacgagcgtgacaccacgatgcctgtagcaatggcaacaacgttgcgcaaactattaactggcgaactacttactctagcttcccggcaacaattaatagactggatggaggcggataaagttgcaggaccacttctgcgctcggcccttccggctggctggtttattgctgataaatctggagccggtgagcgtggttctcgcggtatcattgcagcactggggccagatggtaagccctcccgtatcgtagttatctacacgacggggagtcaggcaactatggatgaacgaaatagacagatcgctgagataggtgcctcactgattaagcattggtaactgtcagaccaagtttactcatatatactttagattgatttaaaacttcatttttaatttaaaaggatctaggtgaagatcctttttgataatctcatgaccaaaatcccttaacgtgagttttcgttccactgagcgtcagaccccgtagaaaagatcaaaggatcttcttgagatcctttttttctgcgcgtaatctgctgcttgcaaacaaaaaaaccaccgctaccagcggtggtttgtttgccggatcaagagctaccaactctttttccgaaggtaactggcttcagcagagcgcagataccaaatactgttcttctagtgtagccgtagttaggccaccacttcaagaactctgtagcaccgcctacatacctcgctctgctaatcctgttaccagtggctgctgccagtggcgataagtcgtgtcttaccgggttggactcaagacgatagttaccggataaggcgcagcggtcgggctgaacggggggttcgtgcacacagcccagcttggagcgaacgacctacaccgaactgagatacctacagcgtgagctatgagaaagcgccacgcttcccgaagggagaaaggcggacaggtatccggtaagcggcagggtcggaacaggagagcgcacgagggagcttccagggggaaacgcctggtatctttatagtcctgtcgggtttcgccacctctgacttgagcgtcgatttttgtgatgctcgtcaggg

SEQ ID NO: 154 - DNA, 11148 bp, Artificial sequence
  pCLS8523
ttccataggctccgcccccctgacgagcatcacaaaaatcgacgctcaagtcagaggtggcgaaacccgacaggactataaagataccaggcgtttccccctggaagctccctcgtgcgctctcctgttccgaccctgccgcttaccggatacctgtccgcctttctcccttcgggaagcgtggcgctttctcatagctcacgctgtaggtatctcagttcggtgtaggtcgttcgctccaagctgggctgtgtgcacgaaccccccgttcagcccgaccgctgcgccttatccggtaactatcgtcttgagtccaacccggtaagacacgacttatcgccactggcagcagccactggtaacaggattagcagagcgaggtatgtaggcggtgctacagagttcttgaagtggtggcctaactacggctacactagaaggacagtatttggtatctgcgctctgctgaagccagttaccttcggaaaaagagttggtagctcttgatccggcaaacaaaccaccgctggtagcggtggtttttttgtttgcaagcagcagattacgcgcagaaaaaaaggatctcaagaagatcctttgatcttttctacggggtctgacgctcagtggaacgaaaactcacgttaagggattttggtcatgagattatcaaaaaggatcttcacctagatccttttaaattaaaaatgaagttttaaatcaatctaaagtatatatgagtaaacttggtctgacagttaccaatgcttaatcagtgaggcacctatctcagcgatctgtctatttcgttcatccatagttgcctgactccccgtcgtgtagataactacgatacgggagggcttaccatctggccccagtgctgcaatgataccgcgagacccacgctcaccggctccagatttatcagcaataaaccagccagccggaagggccgagcgcagaagtggtcctgcaactttatccgcctccatccagtctattaattgttgccgggaagctagagtaagtagttcgccagttaatagtttgcgcaacgttgttgccattgctacaggcatcgtggtgtcacgctcgtcgtttggtatggcttcattcagctccggttcccaacgatcaaggcgagttacatgatcccccatgttgtgcaaaaaagcggttagctccttcggtcctccgatcgttgtcagaagtaagttggccgcagtgttatcactcatggttatggcagcactgcataattctcttactgtcatgccatccgtaagatgcttttctgtgactggtgagtactcaaccaagtcattctgagaatagtgtatgcggcgaccgagttgctcttgcccggcgtcaatacgggataataccgcgccacatagcagaactttaaaagtgctcatcattggaaaacgttcttcggggcgaaaactctcaaggatcttaccgctgttgagatccagttcgatgtaacccactcgtgcacccaactgatcttcagcatcttttactttcaccagcgtttctgggtgagcaaaaacaggaaggcaaaatgccgcaaaaaagggaataagggcgacacggaaatgttgaatactcatactcttcctttttcaatattattgaagcatttatcagggttattgtctcatgagcggatacatatttgaatgtatttagaaaaataaacaaataggggttccgcgcacatttccccgaaaagtgccacctgacgtccgatcaaaaatcatcgcttcgctgattaattaccccagaaataaggctaaaaaactaatcgcattatcatcctatggttgttaatttgattcgttcatttgaaggtttgtggggccaggttactgccaatttttcctcttcataaccataaaagctagtattgtagaatctttattgttcggagcagtgcggcgcgaggcacatctgcgtttcaggaacgcgaccggtgaagacgaggacgcacggaggagagtcttccttcggagggctgtcacccgctcggcggcttctaatccgtacttcaatatagcaatgagcagttaagcgtattactgaaagttccaaagagaaggtttttttaggctaatcgacctcgagcagatccgccaggcgtgtatatagcgtggatggccaggcaactttagtgctgacacatacaggcatatatatatgtgtgcgacgacacatgatcatatggcatgcatgtgctctgtatgtatataaaactcttgttttcttcttttctctaaatattctttccttatacattaggtcctttgtagcataaattactatacttctatagacacgcaaacacaaatacacagcggccttgccaccatggtggatctacgcacgctcggctacagccagcagcaacaggagaagatcaaaccgaaggttcgttcgacagtggcgcagcaccacgaggcactggtcggccacgggtttacacacgcgcacatcgttgcgttaagccaacacccggcagcgttagggaccgtcgctgtcaagtatcaggacatgatcgcagcgttgccagaggcgacacacgaagcgatcgttggcgtcggcaaacagtggtccggcgcacgcgctctggaggccttgctcacggtggcgggagagttgagaggtccaccgttacagttggacacaggccaacttctcaagattgcaaaacgtggcggcgtgaccgcagtggaggcagtgcatgcatggcgcaatgcactgacgggtgccccgctcaacttgaccccggagcaggtggtggccatcgccagccacgatggcggcaagcaggcgctggagacggtccagcggctgttgccggtgctgtgccaggcccacggcttgaccccccagcaggtggtggccatcgccagcaatggcggtggcaagcaggcgctggagacggtccagcggctgttgccggtgctgtgccaggcccacggcttgaccccggagcaggtggtggccatcgccagcaatattggtggcaagcaggcgctggagacggtgcaggcgctgttgccggtgctgtgccaggcccacggcttgaccccccagcaggtggtggccatcgccagcaatggcggtggcaagcaggcgctggagacggtccagcggctgttgccggtgctgtgccaggcccacggcttgaccccggagcaggtggtggccatcgccagcaatattggtggcaagcaggcgctggagacggtgcaggcgctgttgccggtgctgtgccaggcccacggcttgaccccggagcaggtggtggccatcgccagcaatattggtggcaagcaggcgctggagacggtgcaggcgctgttgccggtgctgtgccaggcccacggcttgaccccggagcaggtggtggccatcgccagcaatattggtggcaagcaggcgctggagacggtgcaggcgctgttgccggtgctgtgccaggcccacggcttgaccccggagcaggtggtggccatcgccagccacgatggcggcaagcaggcgctggagacggtccagcggctgttgccggtgctgtgccaggcccacggcttgaccccggagcaggtggtggccatcgccagccacgatggcggcaagcaggcgctggagacggtccagcggctgttgccggtgctgtgccaggcccacggcttgaccccccagcaggtggtggccatcgccagcaatggcggtggcaagcaggcgctggagacggtccagcggctgttgccggtgctgtgccaggcccacggcttgaccccggagcaggtggtggccatcgccagcaatattggtggcaagcaggcgctggagacggtgcaggcgctgttgccggtgctgtgccaggcccacggcttgaccccggagcaggtggtggccatcgccagcaatattggtggcaagcaggcgctggagacggtgcaggcgctgttgccggtgctgtgccaggcccacggcttgaccccggagcaggtggtggccatcgccagccacgatggcggcaagcaggcgctggagacggtccagcggctgttgccggtgctgtgccaggcccacggcttgaccccggagcaggtggtggccatcgccagccacgatggcggcaagcaggcgctggagacggtccagcggctgttgccggtgctgtgccaggcccacggcttgaccccggagcaggtggtggccatcgccagccacgatggcggcaagcaggcgctggagacggtccagcggctgttgccggtgctgtgccaggcccacggcttgaccccccagcaggtggtggccatcgccagcaatggcggtggcaagcaggcgctggagacggtccagcggctgttgccggtgctgtgccaggcccacggcttgaccccggagcaggtggtggccatcgccagccacgatggcggcaagcaggcgctggagacggtccagcggctgttgccggtgctgtgccaggcccacggcttgacccctcagcaggtggtggccatcgccagcaatggcggcggcaggccggcgctggagagcattgttgcccagttatctcgccctgatccgggatccaagtctggcatctaccagattaagaacaccctgaataacaaagtgtatgttggatctgccaaggactttgagaaaagatggaagaggcacttcaaggatctggaaaagggttgccacagctccatcaagctccaaaggtctttcaacaaacatggcaatgtctttgagtgctccattttggaagagatcccttatgaaaaggacctcattatagagagggaaaacttctggatcaaggagctgaactcaaaaatcaatggatacaacattgcagatgccacatttggtgacacctgttctactcacccccttaaggaagagatcattaaaaagaggtctgagactgtgaaggctaagatgttgaaactggggcctgatggcagaaaggcactctactctaagccaggtagcaaaaatggaaggtggaaccctgagacccacaagttctgcaaatgtggggtgagaatacagacatcagcctacacttgcagcaagtgtaggaacagatcaggagagaataactcctttttcaaccacaagcattctgacatcaccaagtccaaaatttcaggcaagatgaaaggtcaaggtccatcggccgactgataactcgagcgatcctctagacgagctcctcgagcctgcagcagctgaagctttggacttcttcgccagaggtttggtcaagtctccaatcaaggttgtcggcttgtctaccttgccagaaatttacgaaaagatggaaaagggtcaaatcgttggtagatacgttgttgacacttctaaataagcgaatttcttatgatttatgatttttattattaaataagttataaaaaaaataagtgtatacaaattttaaagtgactcttaggttttaaaacgaaaattcttattcttgagtaactctttcctgtaggtcaggttgctttctcaggtatagcatgaggtcgctcttattgaccacacctctaccggcatgcaagcttggcgtaatcatggtcatagctgtttcctgtgtgaaattgttatccgctcacaattccacacaacatacgagccggaagcataaagtgtaaagcctggggtgcctaatgagtgagctaactcacattaattgcgttgcgctcactgcccgctttccagtcgggaaacctgtcgtgccagcagatctattacattatgggtggtatgttggaataaaaatcaactatcatctactaactagtatttacgttactagtatattatcatatacggtgttagaagatgacgcaaatgatgagaaatagtcatctaaattagtggaagctgaaacgcaaggattgataatgtaataggatcaatgaatattaacatataaaatgatgataataatatttatagaattgtgtagaattgcagattcccttttatggattcctaaatcctcgaggagaacttctagtatatctacatacctaatattattgccttattaaaaatggaatcccaacaattacatcaaaatccacattctcttcaaaatcaattgtcctgtacttccttgttcatgtgtgttcaaaaacgttatatttataggataattatactctatttctcaacaagtaattggttgtttggccgagcggtctaaggcgcctgattcaagaaatatcttgaccgcagttaactgtgggaatactcaggtatcgtaagatgcaagagttcgaatctcttagcaaccattatttttttcctcaacataacgagaacacacaggggcgctatcgcacagaatcaaattcgatgactggaaattttttgttaatttcagaggtcgcctgacgcatatacctttttcaactgaaaaattgggagaaaaaggaaaggtgagagccgcggaaccggcttttcatatagaatagagaagcgttcatgactaaatgcttgcatcacaatacttgaagttgacaatattatttaaggacctattgttttttccaataggtggttagcaatcgtcttactttctaacttttcttaccttttacatttcagcaatatatatatatatatttcaaggatataccattctaatgtctgcccctaagaagatcgtcgttttgccaggtgaccacgttggtcaagaaatcacagccgaagccattaaggttcttaaagctatttctgatgttcgttccaatgtcaagttcgatttcgaaaatcatttaattggtggtgctgctatcgatgctacaggtgtcccacttccagatgaggcgctggaagcctccaagaaggttgatgccgttttgttaggtgctgtgggtggtcctaaatggggtaccggtagtgttagacctgaacaaggtttactaaaaatccgtaaagaacttcaattgtacgccaacttaagaccatgtaactttgcatccgactctcttttagacttatctccaatcaagccacaatttgctaaaggtactgacttcgttgttgtcagagaattagtgggaggtatttactttggtaagagaaaggaagacgatggtgatggtgtcgcttgggatagtgaacaatacaccgttccagaagtgcaaagaatcacaagaatggccgctttcatggccctacaacatgagccaccattgcctatttggtccttggataaagctaatgttttggcctcttcaagattatggagaaaaactgtggaggaaaccatcaagaacgaattccctacattgaaggttcaacatcaattgattgattctgccgccatgatcctagttaagaacccaacccacctaaatggtattataatcaccagcaacatgtttggtgatatcatctccgatgaagcctccgttatcccaggttccttgggtttgttgccatctgcgtccttggcctctttgccagacaagaacaccgcatttggtttgtacgaaccatgccacggttctgctccagatttgccaaagaataaggtcaaccctatcgccactatcttgtctgctgcaatgatgttgaaattgtcattgaacttgcctgaagaaggtaaggccattgaagatgcagttaaaaaggttttggatgcaggtatcagaactggtgatttaggtggttccaacagtaccacggaagtcggtgatgctgtcgccgaagaagttaagaaaatccttgcttaaaaagattctctttttttatgatatttgtacataaactttataaatgaaattcataatagaaacgacacgaaattacaaaatggaatatgttcatagggtagacgaaactatatacgcaatctacatacatttatcaagaaggagaaaaaggaggatgtaaaggaatacaggtaagcaaattgatactaatggctcaacgtgataaggaaaaagaattgcactttaacattaatattgacaaggaggagggcaccacacaaaaagttaggtgtaacagaaaatcatgaaactatgattcctaatttatatattggaggattttctctaaaaaaaaaaaaatacaacaaataaaaaacactcaatgacctgaccatttgatggagtttaagtcaataccttcttgaaccatttcccataatggtgaaagttccctcaagaattttactctgtcagaaacggccttaacgacgtagtcgacctcctcttcagtactaaatctaccaataccaaatctgatggaagaatgggctaatgcatcatccttacccagcgcatgtaaaacataagaaggttctagggaagcagatgtacaggctgaacccgaggataatgcgatatcccttagtgccatcaataaagattctccttccacgtaggcgaaagaaacgttaacacaccctggataacgatgatctggagatccgttcaacgtggtatgttcagcggataatagacctttgactaatttatcggatagtcttttgatgtgagcttggtcgttgtcaaattctttcttcatcaatctcgcagcttcaccaaatcccgctaccaatgggggggccaaagtaccagatctgctgcattaatgaatcggccaacgcgcggggagaggcggtttgcgtattgggcgctcttccgcttcctcgctcactgactcgctgcgctcggtcgttcggctgcggcgagcggtatcagcatcgatgaattccacggactatagactatactagtatactccgtctactgtacgatacacttccgctcaggtccttgtcctttaacgaggccttaccactcttttgttactctattgatccagctcagcaaaggcagtgtgatctaagattctatcttcgcgatgtagtaaaactagctagaccgagaaagagactagaaatgcaaaaggcacttctacaatggctgccatcattattatccgatgtgacgctgcagcttctcaatgatattcgaatacgctttgaggagatacagcctaatatccgacaaactgttttacagatttacgatcgtacttgttacccatcattgaattttgaacatccgaacctgggagttttccctgaaacagatagtatatttgaacctgtataataatatatagtctagcgctttacggaagacaatgtatgtatttcggttcctggagaaactattgcatctattgcataggtaatcttgcacgtcgcatccccggttcattttctgcgtttccatcttgcacttcaatagcatatctttgttaacgaagcatctgtgcttcattttgtagaacaaaaatgcaacgcgagagcgctaatttttcaaacaaagaatctgagctgcatttttacagaacagaaatgcaacgcgaaagcgctattttaccaacgaagaatctgtgcttcatttttgtaaaacaaaaatgcaacgcgagagcgctaatttttcaaacaaagaatctgagctgcatttttacagaacagaaatgcaacgcgagagcgctattttaccaacaaagaatctatacttcttttttgttctacaaaaatgcatcccgagagcgctatttttctaacaaagcatcttagattactttttttctcctttgtgcgctctataatgcagtctcttgataactttttgcactgtaggtccgttaaggttagaagaaggctactttggtgtctattttctcttccataaaaaaagcctgactccacttcccgcgtttactgattactagcgaagctgcgggtgcattttttcaagataaaggcatccccgattatattctataccgatgtggattgcgcatactttgtgaacagaaagtgatagcgttgatgattcttcattggtcagaaaattatgaacggtttcttctattttgtctctatatactacgtataggaaatgtttacattttcgtattgttttcgattcactctatgaatagttcttactacaatttttttgtctaaagagtaatactagagataaacataaaaaatgtagaggtcgagtttagatgcaagttcaaggagcgaaaggtggatgggtaggttatatagggatatagcacagagatatatagcaaagagatacttttgagcaatgtttgtggaagcggtattcgcaatattttagtagctcgttacagtccggtgcgtttttggttttttgaaagtgcgtcttcagagcgcttttggttttcaaaagcgctctgaagttcctatactttctagagaataggaacttcggaataggaacttcaaagcgtttccgaaaacgagcgcttccgaaaatgcaacgcgagctgcgcacatacagctcactgttcacgtcgcacctatatctgcgtgttgcctgtatatatatatacatgagaagaacggcatagtgcgtgtttatgcttaaatgcgtacttatatgcgtctatttatgtaggatgaaaggtagtctagtacctcctgtgatattatcccattccatgcggggtatcgtatgcttccttcagcactaccctttagctgttctatatgctgccactcctcaattggattagtctcatccttcaatgctatcatttcctttgatattggatcatatgcatagtaccgagaaactagtgcgaagtagtgatcaggtattgctgttatctgatgagtatacgttgtcctggccacggcagaagcacgcttatcgctccaatttcccacaacattagtcaactccgttaggcccttcattgaaagaaatgaggtcatcaaatgtcttccaatgtgagattttgggccattttttatagcaaagattgaataaggcgcatttttcttcaaagctttattgtacgatctgactaagttatcttttaataattggtattcctgtttattgcttgaagaattgccggtcctatttactcgttttaggactggttcagaattcatcgatgctcactcaaaggtcggtaatacggttatccacagaatcaggggataacgcaggaaagaacatgtgagcaaaaggccagcaaaaggccaggaaccgtaaaaaggccgcgttgctggcgttt

SEQ ID NO: 155 - DNA, 11109 bp, Artificial sequence
  pCLS8524
ttccataggctccgcccccctgacgagcatcacaaaaatcgacgctcaagtcagaggtggcgaaacccgacaggactataaagataccaggcgtttccccctggaagctccctcgtgcgctctcctgttccgaccctgccgcttaccggatacctgtccgcctttctcccttcgggaagcgtggcgctttctcatagctcacgctgtaggtatctcagttcggtgtaggtcgttcgctccaagctgggctgtgtgcacgaaccccccgttcagcccgaccgctgcgccttatccggtaactatcgtcttgagtccaacccggtaagacacgacttatcgccactggcagcagccactggtaacaggattagcagagcgaggtatgtaggcggtgctacagagttcttgaagtggtggcctaactacggctacactagaaggacagtatttggtatctgcgctctgctgaagccagttaccttcggaaaaagagttggtagctcttgatccggcaaacaaaccaccgctggtagcggtggtttttttgtttgcaagcagcagattacgcgcagaaaaaaaggatctcaagaagatcctttgatcttttctacggggtctgacgctcagtggaacgaaaactcacgttaagggattttggtcatgagattatcaaaaaggatcttcacctagatccttttaaattaaaaatgaagttttaaatcaatctaaagtatatatgagtaaacttggtctgacagttaccaatgcttaatcagtgaggcacctatctcagcgatctgtctatttcgttcatccatagttgcctgactccccgtcgtgtagataactacgatacgggagggcttaccatctggccccagtgctgcaatgataccgcgagacccacgctcaccggctccagatttatcagcaataaaccagccagccggaagggccgagcgcagaagtggtcctgcaactttatccgcctccatccagtctattaattgttgccgggaagctagagtaagtagttcgccagttaatagtttgcgcaacgttgttgccattgctacaggcatcgtggtgtcacgctcgtcgtttggtatggcttcattcagctccggttcccaacgatcaaggcgagttacatgatcccccatgttgtgcaaaaaagcggttagctccttcggtcctccgatcgttgtcagaagtaagttggccgcagtgttatcactcatggttatggcagcactgcataattctcttactgtcatgccatccgtaagatgcttttctgtgactggtgagtactcaaccaagtcattctgagaatagtgtatgcggcgaccgagttgctcttgcccggcgtcaatacgggataataccgcgccacatagcagaactttaaaagtgctcatcattggaaaacgttcttcggggcgaaaactctcaaggatcttaccgctgttgagatccagttcgatgtaacccactcgtgcacccaactgatcttcagcatcttttactttcaccagcgtttctgggtgagcaaaaacaggaaggcaaaatgccgcaaaaaagggaataagggcgacacggaaatgttgaatactcatactcttcctttttcaatattattgaagcatttatcagggttattgtctcatgagcggatacatatttgaatgtatttagaaaaataaacaaataggggttccgcgcacatttccccgaaaagtgccacctgacgtccgatcaaaaatcatcgcttcgctgattaattaccccagaaataaggctaaaaaactaatcgcattatcatcctatggttgttaatttgattcgttcatttgaaggtttgtggggccaggttactgccaatttttcctcttcataaccataaaagctagtattgtagaatctttattgttcggagcagtgcggcgcgaggcacatctgcgtttcaggaacgcgaccggtgaagacgaggacgcacggaggagagtcttccttcggagggctgtcacccgctcggcggcttctaatccgtacttcaatatagcaatgagcagttaagcgtattactgaaagttccaaagagaaggtttttttaggctaatcgacctcgagcagatccgccaggcgtgtatatagcgtggatggccaggcaactttagtgctgacacatacaggcatatatatatgtgtgcgacgacacatgatcatatggcatgcatgtgctctgtatgtatataaaactcttgttttcttcttttctctaaatattctttccttatacattaggtcctttgtagcataaattactatacttctatagacacgcaaacacaaatacacagcggccttgccaccatggtggatctacgcacgctcggctacagccagcagcaacaggagaagatcaaaccgaaggttcgttcgacagtggcgcagcaccacgaggcactggtcggccacgggtttacacacgcgcacatcgttgcgttaagccaacacccggcagcgttagggaccgtcgctgtcaagtatcaggacatgatcgcagcgttgccagaggcgacacacgaagcgatcgttggcgtcggcaaacagtggtccggcgcacgcgctctggaggccttgctcacggtggcgggagagttgagaggtccaccgttacagttggacacaggccaacttctcaagattgcaaaacgtggcggcgtgaccgcagtggaggcagtgcatgcatggcgcaatgcactgacgggtgccccgctcaacttgaccccggagcaggtggtggccatcgccagccacgatggcggcaagcaggcgctggagacggtccagcggctgttgccggtgctgtgccaggcccacggcttgaccccccagcaggtggtggccatcgccagcaatggcggtggcaagcaggcgctggagacggtccagcggctgttgccggtgctgtgccaggcccacggcttgaccccggagcaggtggtggccatcgccagcaatattggtggcaagcaggcgctggagacggtgcaggcgctgttgccggtgctgtgccaggcccacggcttgaccccccagcaggtggtggccatcgccagcaatggcggtggcaagcaggcgctggagacggtccagcggctgttgccggtgctgtgccaggcccacggcttgaccccggagcaggtggtggccatcgccagcaatattggtggcaagcaggcgctggagacggtgcaggcgctgttgccggtgctgtgccaggcccacggcttgaccccggagcaggtggtggccatcgccagcaatattggtggcaagcaggcgctggagacggtgcaggcgctgttgccggtgctgtgccaggcccacggcttgaccccggagcaggtggtggccatcgccagcaatattggtggcaagcaggcgctggagacggtgcaggcgctgttgccggtgctgtgccaggcccacggcttgaccccggagcaggtggtggccatcgccagccacgatggcggcaagcaggcgctggagacggtccagcggctgttgccggtgctgtgccaggcccacggcttgaccccggagcaggtggtggccatcgccagccacgatggcggcaagcaggcgctggagacggtccagcggctgttgccggtgctgtgccaggcccacggcttgaccccccagcaggtggtggccatcgccagcaatggcggtggcaagcaggcgctggagacggtccagcggctgttgccggtgctgtgccaggcccacggcttgaccccggagcaggtggtggccatcgccagcaatattggtggcaagcaggcgctggagacggtgcaggcgctgttgccggtgctgtgccaggcccacggcttgaccccggagcaggtggtggccatcgccagcaatattggtggcaagcaggcgctggagacggtgcaggcgctgttgccggtgctgtgccaggcccacggcttgaccccggagcaggtggtggccatcgccagccacgatggcggcaagcaggcgctggagacggtccagcggctgttgccggtgctgtgccaggcccacggcttgaccccggagcaggtggtggccatcgccagccacgatggcggcaagcaggcgctggagacggtccagcggctgttgccggtgctgtgccaggcccacggcttgaccccggagcaggtggtggccatcgccagccacgatggcggcaagcaggcgctggagacggtccagcggctgttgccggtgctgtgccaggcccacggcttgaccccccagcaggtggtggccatcgccagcaatggcggtggcaagcaggcgctggagacggtccagcggctgttgccggtgctgtgccaggcccacggcttgaccccggagcaggtggtggccatcgccagccacgatggcggcaagcaggcgctggagacggtccagcggctgttgccggtgctgtgccaggcccacggcttgacccctcagcaggtggtggccatcgccagcaatggcggcggcaggccggcgctggagagcattgttgcccagttatctcgccctgatccgggatccaagtctggcatctaccagattaagaacaccctgaataacaaagtgtatgttggatctgccaaggactttgagaaaagatggaagaggcacttcaaggatctggaaaagggttgccacagctccatcaagctccaaaggtctttcaacaaacatggcaatgtctttgagtgctccattttggaagagatcccttatgaaaaggacctcattatagagagggaaaacttctggatcaaggagctgaactcaaaaatcaatggatacaacattgcagatgccacatttggtgacacctgttctactcacccccttaaggaagagatcattaaaaagaggtctgagactgtgaaggctaagatgttgaaactggggcctgatggcagaaaggcactctactctaagccaggtagcaaaaatggaaggtggaaccctgagacccacaagttctgcaaatgtggggtgagaatacagacatcagcctacacttgcagcaagtgtaggaacagatcaggagagaataactcctttttcaaccacaagcattctcaaggtccatcggccgactgataactcgagcgatcctctagacgagctcctcgagcctgcagcagctgaagctttggacttcttcgccagaggtttggtcaagtctccaatcaaggttgtcggcttgtctaccttgccagaaatttacgaaaagatggaaaagggtcaaatcgttggtagatacgttgttgacacttctaaataagcgaatttcttatgatttatgatttttattattaaataagttataaaaaaaataagtgtatacaaattttaaagtgactcttaggttttaaaacgaaaattcttattcttgagtaactctttcctgtaggtcaggttgctttctcaggtatagcatgaggtcgctcttattgaccacacctctaccggcatgcaagcttggcgtaatcatggtcatagctgtttcctgtgtgaaattgttatccgctcacaattccacacaacatacgagccggaagcataaagtgtaaagcctggggtgcctaatgagtgagctaactcacattaattgcgttgcgctcactgcccgctttccagtcgggaaacctgtcgtgccagcagatctattacattatgggtggtatgttggaataaaaatcaactatcatctactaactagtatttacgttactagtatattatcatatacggtgttagaagatgacgcaaatgatgagaaatagtcatctaaattagtggaagctgaaacgcaaggattgataatgtaataggatcaatgaatattaacatataaaatgatgataataatatttatagaattgtgtagaattgcagattcccttttatggattcctaaatcctcgaggagaacttctagtatatctacatacctaatattattgccttattaaaaatggaatcccaacaattacatcaaaatccacattctcttcaaaatcaattgtcctgtacttccttgttcatgtgtgttcaaaaacgttatatttataggataattatactctatttctcaacaagtaattggttgtttggccgagcggtctaaggcgcctgattcaagaaatatcttgaccgcagttaactgtgggaatactcaggtatcgtaagatgcaagagttcgaatctcttagcaaccattatttttttcctcaacataacgagaacacacaggggcgctatcgcacagaatcaaattcgatgactggaaattttttgttaatttcagaggtcgcctgacgcatatacctttttcaactgaaaaattgggagaaaaaggaaaggtgagagccgcggaaccggcttttcatatagaatagagaagcgttcatgactaaatgcttgcatcacaatacttgaagttgacaatattatttaaggacctattgttttttccaataggtggttagcaatcgtcttactttctaacttttcttaccttttacatttcagcaatatatatatatatatttcaaggatataccattctaatgtctgcccctaagaagatcgtcgttttgccaggtgaccacgttggtcaagaaatcacagccgaagccattaaggttcttaaagctatttctgatgttcgttccaatgtcaagttcgatttcgaaaatcatttaattggtggtgctgctatcgatgctacaggtgtcccacttccagatgaggcgctggaagcctccaagaaggttgatgccgttttgttaggtgctgtgggtggtcctaaatggggtaccggtagtgttagacctgaacaaggtttactaaaaatccgtaaagaacttcaattgtacgccaacttaagaccatgtaactttgcatccgactctcttttagacttatctccaatcaagccacaatttgctaaaggtactgacttcgttgttgtcagagaattagtgggaggtatttactttggtaagagaaaggaagacgatggtgatggtgtcgcttgggatagtgaacaatacaccgttccagaagtgcaaagaatcacaagaatggccgctttcatggccctacaacatgagccaccattgcctatttggtccttggataaagctaatgttttggcctcttcaagattatggagaaaaactgtggaggaaaccatcaagaacgaattccctacattgaaggttcaacatcaattgattgattctgccgccatgatcctagttaagaacccaacccacctaaatggtattataatcaccagcaacatgtttggtgatatcatctccgatgaagcctccgttatcccaggttccttgggtttgttgccatctgcgtccttggcctctttgccagacaagaacaccgcatttggtttgtacgaaccatgccacggttctgctccagatttgccaaagaataaggtcaaccctatcgccactatcttgtctgctgcaatgatgttgaaattgtcattgaacttgcctgaagaaggtaaggccattgaagatgcagttaaaaaggttttggatgcaggtatcagaactggtgatttaggtggttccaacagtaccacggaagtcggtgatgctgtcgccgaagaagttaagaaaatccttgcttaaaaagattctctttttttatgatatttgtacataaactttataaatgaaattcataatagaaacgacacgaaattacaaaatggaatatgttcatagggtagacgaaactatatacgcaatctacatacatttatcaagaaggagaaaaaggaggatgtaaaggaatacaggtaagcaaattgatactaatggctcaacgtgataaggaaaaagaattgcactttaacattaatattgacaaggaggagggcaccacacaaaaagttaggtgtaacagaaaatcatgaaactatgattcctaatttatatattggaggattttctctaaaaaaaaaaaaatacaacaaataaaaaacactcaatgacctgaccatttgatggagtttaagtcaataccttcttgaaccatttcccataatggtgaaagttccctcaagaattttactctgtcagaaacggccttaacgacgtagtcgacctcctcttcagtactaaatctaccaataccaaatctgatggaagaatgggctaatgcatcatccttacccagcgcatgtaaaacataagaaggttctagggaagcagatgtacaggctgaacccgaggataatgcgatatcccttagtgccatcaataaagattctccttccacgtaggcgaaagaaacgttaacacaccctggataacgatgatctggagatccgttcaacgtggtatgttcagcggataatagacctttgactaatttatcggatagtcttttgatgtgagcttggtcgttgtcaaattctttcttcatcaatctcgcagcttcaccaaatcccgctaccaatgggggggccaaagtaccagatctgctgcattaatgaatcggccaacgcgcggggagaggcggtttgcgtattgggcgctcttccgcttcctcgctcactgactcgctgcgctcggtcgttcggctgcggcgagcggtatcagcatcgatgaattccacggactatagactatactagtatactccgtctactgtacgatacacttccgctcaggtccttgtcctttaacgaggccttaccactcttttgttactctattgatccagctcagcaaaggcagtgtgatctaagattctatcttcgcgatgtagtaaaactagctagaccgagaaagagactagaaatgcaaaaggcacttctacaatggctgccatcattattatccgatgtgacgctgcagcttctcaatgatattcgaatacgctttgaggagatacagcctaatatccgacaaactgttttacagatttacgatcgtacttgttacccatcattgaattttgaacatccgaacctgggagttttccctgaaacagatagtatatttgaacctgtataataatatatagtctagcgctttacggaagacaatgtatgtatttcggttcctggagaaactattgcatctattgcataggtaatcttgcacgtcgcatccccggttcattttctgcgtttccatcttgcacttcaatagcatatctttgttaacgaagcatctgtgcttcattttgtagaacaaaaatgcaacgcgagagcgctaatttttcaaacaaagaatctgagctgcatttttacagaacagaaatgcaacgcgaaagcgctattttaccaacgaagaatctgtgcttcatttttgtaaaacaaaaatgcaacgcgagagcgctaatttttcaaacaaagaatctgagctgcatttttacagaacagaaatgcaacgcgagagcgctattttaccaacaaagaatctatacttcttttttgttctacaaaaatgcatcccgagagcgctatttttctaacaaagcatcttagattactttttttctcctttgtgcgctctataatgcagtctcttgataactttttgcactgtaggtccgttaaggttagaagaaggctactttggtgtctattttctcttccataaaaaaagcctgactccacttcccgcgtttactgattactagcgaagctgcgggtgcattttttcaagataaaggcatccccgattatattctataccgatgtggattgcgcatactttgtgaacagaaagtgatagcgttgatgattcttcattggtcagaaaattatgaacggtttcttctattttgtctctatatactacgtataggaaatgtttacattttcgtattgttttcgattcactctatgaatagttcttactacaatttttttgtctaaagagtaatactagagataaacataaaaaatgtagaggtcgagtttagatgcaagttcaaggagcgaaaggtggatgggtaggttatatagggatatagcacagagatatatagcaaagagatacttttgagcaatgtttgtggaagcggtattcgcaatattttagtagctcgttacagtccggtgcgtttttggttttttgaaagtgcgtcttcagagcgcttttggttttcaaaagcgctctgaagttcctatactttctagagaataggaacttcggaataggaacttcaaagcgtttccgaaaacgagcgcttccgaaaatgcaacgcgagctgcgcacatacagctcactgttcacgtcgcacctatatctgcgtgttgcctgtatatatatatacatgagaagaacggcatagtgcgtgtttatgcttaaatgcgtacttatatgcgtctatttatgtaggatgaaaggtagtctagtacctcctgtgatattatcccattccatgcggggtatcgtatgcttccttcagcactaccctttagctgttctatatgctgccactcctcaattggattagtctcatccttcaatgctatcatttcctttgatattggatcatatgcatagtaccgagaaactagtgcgaagtagtgatcaggtattgctgttatctgatgagtatacgttgtcctggccacggcagaagcacgcttatcgctccaatttcccacaacattagtcaactccgttaggcccttcattgaaagaaatgaggtcatcaaatgtcttccaatgtgagattttgggccattttttatagcaaagattgaataaggcgcatttttcttcaaagctttattgtacgatctgactaagttatcttttaataattggtattcctgtttattgcttgaagaattgccggtcctatttactcgttttaggactggttcagaattcatcgatgctcactcaaaggtcggtaatacggttatccacagaatcaggggataacgcaggaaagaacatgtgagcaaaaggccagcaaaaggccaggaaccgtaaaaaggccgcgttgctggcgttt

SEQ ID NO: 156 - DNA, 8334 bp, Artificial sequence
  pCLS0542
tgtgtgcggccgactgataactcgagcgatcctctagacgagctcctcgagcctgcagcagctgaagctttggacttcttcgccagaggtttggtcaagtctccaatcaaggttgtcggcttgtctaccttgccagaaatttacgaaaagatggaaaagggtcaaatcgttggtagatacgttgttgacacttctaaataagcgaatttcttatgatttatgatttttattattaaataagttataaaaaaaataagtgtatacaaattttaaagtgactcttaggttttaaaacgaaaattcttattcttgagtaactctttcctgtaggtcaggttgctttctcaggtatagcatgaggtcgctcttattgaccacacctctaccggcatgcaagcttggcgtaatcatggtcatagctgtttcctgtgtgaaattgttatccgctcacaattccacacaacatacgagccggaagcataaagtgtaaagcctggggtgcctaatgagtgagctaactcacattaattgcgttgcgctcactgcccgctttccagtcgggaaacctgtcgtgccagcagatctattacattatgggtggtatgttggaataaaaatcaactatcatctactaactagtatttacgttactagtatattatcatatacggtgttagaagatgacgcaaatgatgagaaatagtcatctaaattagtggaagctgaaacgcaaggattgataatgtaataggatcaatgaatattaacatataaaatgatgataataatatttatagaattgtgtagaattgcagattcccttttatggattcctaaatcctcgaggagaacttctagtatatctacatacctaatattattgccttattaaaaatggaatcccaacaattacatcaaaatccacattctcttcaaaatcaattgtcctgtacttccttgttcatgtgtgttcaaaaacgttatatttataggataattatactctatttctcaacaagtaattggttgtttggccgagcggtctaaggcgcctgattcaagaaatatcttgaccgcagttaactgtgggaatactcaggtatcgtaagatgcaagagttcgaatctcttagcaaccattatttttttcctcaacataacgagaacacacaggggcgctatcgcacagaatcaaattcgatgactggaaattttttgttaatttcagaggtcgcctgacgcatatacctttttcaactgaaaaattgggagaaaaaggaaaggtgagagccgcggaaccggcttttcatatagaatagagaagcgttcatgactaaatgcttgcatcacaatacttgaagttgacaatattatttaaggacctattgttttttccaataggtggttagcaatcgtcttactttctaacttttcttaccttttacatttcagcaatatatatatatatatttcaaggatataccattctaatgtctgcccctaagaagatcgtcgttttgccaggtgaccacgttggtcaagaaatcacagccgaagccattaaggttcttaaagctatttctgatgttcgttccaatgtcaagttcgatttcgaaaatcatttaattggtggtgctgctatcgatgctacaggtgtcccacttccagatgaggcgctggaagcctccaagaaggttgatgccgttttgttaggtgctgtgggtggtcctaaatggggtaccggtagtgttagacctgaacaaggtttactaaaaatccgtaaagaacttcaattgtacgccaacttaagaccatgtaactttgcatccgactctcttttagacttatctccaatcaagccacaatttgctaaaggtactgacttcgttgttgtcagagaattagtgggaggtatttactttggtaagagaaaggaagacgatggtgatggtgtcgcttgggatagtgaacaatacaccgttccagaagtgcaaagaatcacaagaatggccgctttcatggccctacaacatgagccaccattgcctatttggtccttggataaagctaatgttttggcctcttcaagattatggagaaaaactgtggaggaaaccatcaagaacgaattccctacattgaaggttcaacatcaattgattgattctgccgccatgatcctagttaagaacccaacccacctaaatggtattataatcaccagcaacatgtttggtgatatcatctccgatgaagcctccgttatcccaggttccttgggtttgttgccatctgcgtccttggcctctttgccagacaagaacaccgcatttggtttgtacgaaccatgccacggttctgctccagatttgccaaagaataaggtcaaccctatcgccactatcttgtctgctgcaatgatgttgaaattgtcattgaacttgcctgaagaaggtaaggccattgaagatgcagttaaaaaggttttggatgcaggtatcagaactggtgatttaggtggttccaacagtaccacggaagtcggtgatgctgtcgccgaagaagttaagaaaatccttgcttaaaaagattctctttttttatgatatttgtacataaactttataaatgaaattcataatagaaacgacacgaaattacaaaatggaatatgttcatagggtagacgaaactatatacgcaatctacatacatttatcaagaaggagaaaaaggaggatgtaaaggaatacaggtaagcaaattgatactaatggctcaacgtgataaggaaaaagaattgcactttaacattaatattgacaaggaggagggcaccacacaaaaagttaggtgtaacagaaaatcatgaaactatgattcctaatttatatattggaggattttctctaaaaaaaaaaaaatacaacaaataaaaaacactcaatgacctgaccatttgatggagtttaagtcaataccttcttgaaccatttcccataatggtgaaagttccctcaagaattttactctgtcagaaacggccttaacgacgtagtcgacctcctcttcagtactaaatctaccaataccaaatctgatggaagaatgggctaatgcatcatccttacccagcgcatgtaaaacataagaaggttctagggaagcagatgtacaggctgaacccgaggataatgcgatatcccttagtgccatcaataaagattctccttccacgtaggcgaaagaaacgttaacacaccctggataacgatgatctggagatccgttcaacgtggtatgttcagcggataatagacctttgactaatttatcggatagtcttttgatgtgagcttggtcgttgtcaaattctttcttcatcaatctcgcagcttcaccaaatcccgctaccaatgggggggccaaagtaccagatctgctgcattaatgaatcggccaacgcgcggggagaggcggtttgcgtattgggcgctcttccgcttcctcgctcactgactcgctgcgctcggtcgttcggctgcggcgagcggtatcagcatcgatgaattccacggactatagactatactagtatactccgtctactgtacgatacacttccgctcaggtccttgtcctttaacgaggccttaccactcttttgttactctattgatccagctcagcaaaggcagtgtgatctaagattctatcttcgcgatgtagtaaaactagctagaccgagaaagagactagaaatgcaaaaggcacttctacaatggctgccatcattattatccgatgtgacgctgcagcttctcaatgatattcgaatacgctttgaggagatacagcctaatatccgacaaactgttttacagatttacgatcgtacttgttacccatcattgaattttgaacatccgaacctgggagttttccctgaaacagatagtatatttgaacctgtataataatatatagtctagcgctttacggaagacaatgtatgtatttcggttcctggagaaactattgcatctattgcataggtaatcttgcacgtcgcatccccggttcattttctgcgtttccatcttgcacttcaatagcatatctttgttaacgaagcatctgtgcttcattttgtagaacaaaaatgcaacgcgagagcgctaatttttcaaacaaagaatctgagctgcatttttacagaacagaaatgcaacgcgaaagcgctattttaccaacgaagaatctgtgcttcatttttgtaaaacaaaaatgcaacgcgagagcgctaatttttcaaacaaagaatctgagctgcatttttacagaacagaaatgcaacgcgagagcgctattttaccaacaaagaatctatacttcttttttgttctacaaaaatgcatcccgagagcgctatttttctaacaaagcatcttagattactttttttctcctttgtgcgctctataatgcagtctcttgataactttttgcactgtaggtccgttaaggttagaagaaggctactttggtgtctattttctcttccataaaaaaagcctgactccacttcccgcgtttactgattactagcgaagctgcgggtgcattttttcaagataaaggcatccccgattatattctataccgatgtggattgcgcatactttgtgaacagaaagtgatagcgttgatgattcttcattggtcagaaaattatgaacggtttcttctattttgtctctatatactacgtataggaaatgtttacattttcgtattgttttcgattcactctatgaatagttcttactacaatttttttgtctaaagagtaatactagagataaacataaaaaatgtagaggtcgagtttagatgcaagttcaaggagcgaaaggtggatgggtaggttatatagggatatagcacagagatatatagcaaagagatacttttgagcaatgtttgtggaagcggtattcgcaatattttagtagctcgttacagtccggtgcgtttttggttttttgaaagtgcgtcttcagagcgcttttggttttcaaaagcgctctgaagttcctatactttctagagaataggaacttcggaataggaacttcaaagcgtttccgaaaacgagcgcttccgaaaatgcaacgcgagctgcgcacatacagctcactgttcacgtcgcacctatatctgcgtgttgcctgtatatatatatacatgagaagaacggcatagtgcgtgtttatgcttaaatgcgtacttatatgcgtctatttatgtaggatgaaaggtagtctagtacctcctgtgatattatcccattccatgcggggtatcgtatgcttccttcagcactaccctttagctgttctatatgctgccactcctcaattggattagtctcatccttcaatgctatcatttcctttgatattggatcatatgcatagtaccgagaaactagtgcgaagtagtgatcaggtattgctgttatctgatgagtatacgttgtcctggccacggcagaagcacgcttatcgctccaatttcccacaacattagtcaactccgttaggcccttcattgaaagaaatgaggtcatcaaatgtcttccaatgtgagattttgggccattttttatagcaaagattgaataaggcgcatttttcttcaaagctttattgtacgatctgactaagttatcttttaataattggtattcctgtttattgcttgaagaattgccggtcctatttactcgttttaggactggttcagaattcatcgatgctcactcaaaggtcggtaatacggttatccacagaatcaggggataacgcaggaaagaacatgtgagcaaaaggccagcaaaaggccaggaaccgtaaaaaggccgcgttgctggcgtttttccataggctccgcccccctgacgagcatcacaaaaatcgacgctcaagtcagaggtggcgaaacccgacaggactataaagataccaggcgtttccccctggaagctccctcgtgcgctctcctgttccgaccctgccgcttaccggatacctgtccgcctttctcccttcgggaagcgtggcgctttctcatagctcacgctgtaggtatctcagttcggtgtaggtcgttcgctccaagctgggctgtgtgcacgaaccccccgttcagcccgaccgctgcgccttatccggtaactatcgtcttgagtccaacccggtaagacacgacttatcgccactggcagcagccactggtaacaggattagcagagcgaggtatgtaggcggtgctacagagttcttgaagtggtggcctaactacggctacactagaaggacagtatttggtatctgcgctctgctgaagccagttaccttcggaaaaagagttggtagctcttgatccggcaaacaaaccaccgctggtagcggtggtttttttgtttgcaagcagcagattacgcgcagaaaaaaaggatctcaagaagatcctttgatcttttctacggggtctgacgctcagtggaacgaaaactcacgttaagggattttggtcatgagattatcaaaaaggatcttcacctagatccttttaaattaaaaatgaagttttaaatcaatctaaagtatatatgagtaaacttggtctgacagttaccaatgcttaatcagtgaggcacctatctcagcgatctgtctatttcgttcatccatagttgcctgactccccgtcgtgtagataactacgatacgggagggcttaccatctggccccagtgctgcaatgataccgcgagacccacgctcaccggctccagatttatcagcaataaaccagccagccggaagggccgagcgcagaagtggtcctgcaactttatccgcctccatccagtctattaattgttgccgggaagctagagtaagtagttcgccagttaatagtttgcgcaacgttgttgccattgctacaggcatcgtggtgtcacgctcgtcgtttggtatggcttcattcagctccggttcccaacgatcaaggcgagttacatgatcccccatgttgtgcaaaaaagcggttagctccttcggtcctccgatcgttgtcagaagtaagttggccgcagtgttatcactcatggttatggcagcactgcataattctcttactgtcatgccatccgtaagatgcttttctgtgactggtgagtactcaaccaagtcattctgagaatagtgtatgcggcgaccgagttgctcttgcccggcgtcaatacgggataataccgcgccacatagcagaactttaaaagtgctcatcattggaaaacgttcttcggggcgaaaactctcaaggatcttaccgctgttgagatccagttcgatgtaacccactcgtgcacccaactgatcttcagcatcttttactttcaccagcgtttctgggtgagcaaaaacaggaaggcaaaatgccgcaaaaaagggaataagggcgacacggaaatgttgaatactcatactcttcctttttcaatattattgaagcatttatcagggttattgtctcatgagcggatacatatttgaatgtatttagaaaaataaacaaataggggttccgcgcacatttccccgaaaagtgccacctgacgtccgatcaaaaatcatcgcttcgctgattaattaccccagaaataaggctaaaaaactaatcgcattatcatcctatggttgttaatttgattcgttcatttgaaggtttgtggggccaggttactgccaatttttcctcttcataaccataaaagctagtattgtagaatctttattgttcggagcagtgcggcgcgaggcacatctgcgtttcaggaacgcgaccggtgaagacgaggacgcacggaggagagtcttccttcggagggctgtcacccgctcggcggcttctaatccgtacttcaatatagcaatgagcagttaagcgtattactgaaagttccaaagagaaggtttttttaggctaatcgacctcgagcagatccgccaggcgtgtatatagcgtggatggccaggcaactttagtgctgacacatacaggcatatatatatgtgtgcgacgacacatgatcatatggcatgcatgtgctctgtatgtatataaaactcttgttttcttcttttctctaaatattctttccttatacattaggtcctttgtagcataaattactatacttctatagacacgcaaacacaaatacacagcggccttgccaccatggccggcgcgcccacta

SEQ ID NO: 157 - DNA, 43 bp, Artificial sequence
  Avr05
tatataaacctaaccctctaggtaagagggttaggtttatata

SEQ ID NO: 158 - DNA, 44 bp, Artificial sequence
  Avr06
tatataaacctaaccctctaaggtaagagggttaggtttatata

SEQ ID NO: 159 - DNA, 45 bp, Artificial sequence
  Avr07
tatataaacctaaccctctaaggtacagagggttaggtttatata

SEQ ID NO: 160 - DNA, 46 bp, Artificial sequence
  Avr08
tatataaacctaaccctctgaaggtacagagggttaggtttatata

SEQ ID NO: 161 - DNA, 47 bp, Artificial sequence
  Avr09
tatataaacctaaccctctgaaggtaccagagggttaggtttatata

SEQ ID NO: 162 - DNA, 48 bp, Artificial sequence
  Avr10
tatataaacctaaccctcttgaaggtaccagagggttaggtttatata

SEQ ID NO: 163 - DNA, 49 bp, Artificial sequence
  Avr11
tatataaacctaaccctcttgaaggtacctagagggttaggtttatata

SEQ ID NO: 164 - DNA, 50 bp, Artificial sequence
  Avr12
tatataaacctaaccctctatgaaggtacctagagggttaggtttatata

SEQ ID NO: 165 - DNA, 51 bp, Artificial sequence
  Avr13
tatataaacctaaccctctatgaaggtaccttagagggttaggtttatata

SEQ ID NO: 166 - DNA, 52 bp, Artificial sequence
  Avr14
tatataaacctaaccctctcatgaaggtaccttagagggttaggtttatata

SEQ ID NO: 167 - DNA, 53 bp, Artificial sequence
  AVR15
tatataaacctaaccctcttagcatgaaggtaccagagggttaggtttatata

SEQ ID NO: 168 - DNA, 54 bp, Artificial sequence
  Avr16
tatataaacctaaccctctgcatgaaggtaccttgagagggttaggtttatata

SEQ ID NO: 169 - DNA, 55 bp, Artificial sequence
  Avr17
tatataaacctaaccctctgcatgaaggtaccttgtagagggttaggtttatata

SEQ ID NO: 170 - DNA, 56 bp, Artificial sequence
  Avr18
tatataaacctaaccctctagcatgaaggtaccttgtagagggttaggtttatata

SEQ ID NO: 171 - DNA, 57 bp, Artificial sequence
  Avr19
tatataaacctaaccctctagcatgaaggtaccttgtcagagggttaggtttatata

SEQ ID NO: 172 - DNA, 58 bp, Artificial sequence
  Avr20
tatataaacctaaccctcttagcatgaaggtaccttgtcagagggttaggtttatata

SEQ ID NO: 173 - DNA, 59 bp, Artificial sequence
  Avr21
tatataaacctaaccctcttagcatgaaggtaccttgtcgagagggttaggtttatata

SEQ ID NO: 174 - DNA, 60 bp, Artificial sequence
  Avr22
tatataaacctaaccctcttagcatgaaggtaccttgtcgtagagggttaggtttatata

SEQ ID NO: 175 - DNA, 61 bp, Artificial sequence
  Avr23
tatataaacctaaccctctctagcatgaaggtaccttgtcgtagagggttaggtttatata

SEQ ID NO: 176 - DNA, 62 bp, Artificial sequence
  Avr24
tatataaacctaaccctctctagcatgaaggtaccttgtcgttagagggttaggtttatata

SEQ ID NO: 177 - DNA, 63 bp, Artificial sequence
  Avr25
tatataaacctaaccctctactagcatgaaggtaccttgtcgttagagggttaggtttatata

SEQ ID NO: 178 - DNA, 64 bp, Artificial sequence
  Avr26
tatataaacctaaccctctactagcatgaaggtaccttgtcgttgagagggttaggtttatata

SEQ ID NO: 179 - DNA, 65 bp, Artificial sequence
  Avr27
tatataaacctaaccctctcactagcatgaaggtaccttgtcgttgagagggttaggtttatata

SEQ ID NO: 180 - DNA, 66 bp, Artificial sequence
  Avr28
tatataaacctaaccctctcactagcatgaaggtaccttgtcgttgaagagggttaggtttatata

SEQ ID NO: 181 - DNA, 67 bp, Artificial sequence
  Avr29
tatataaacctaaccctctccactagcatgaaggtaccttgtcgttgaagagggttaggtttatata

SEQ ID NO: 182 - DNA, 68 bp, Artificial sequence
  Avr30
tatataaacctaaccctctccactagcatgaaggtaccttgtcgttgatagagggttaggtttatata

SEQ ID NO: 183 - DNA, 69 bp, Artificial sequence
  Avr31
tatataaacctaaccctctaccactagcatgaaggtaccttgtcgttgatagagggttaggtttatata

SEQ ID NO: 184 - DNA, 70 bp, Artificial sequence
  Avr32
tatataaacctaaccctctaccactagcatgaaggtaccttgtcgttgattagagggttaggtttatata

SEQ ID NO: 185 - DNA, 71 bp, Artificial sequence
  Avr33
tatataaacctaaccctctgaccactagcatgaaggtaccttgtcgttgattagagggttaggtttatata

SEQ ID NO: 186 - DNA, 72 bp, Artificial sequence
  Avr34
tatataaacctaaccctctgaccactagcatgaaggtaccttgtcgttgattcagagggttaggtttatata

SEQ ID NO: 187 - DNA, 73 bp, Artificial sequence
  Avr35
tatataaacctaaccctcttgaccactagcatgaaggtaccttgtcgttgattcagagggttaggtttatata

SEQ ID NO: 188 - DNA, 74 bp, Artificial sequence
  Avr36
tatataaacctaaccctcttgaccactagcatgaaggtaccttgtcgttgattcaagagggttaggtttatata

SEQ ID NO: 189 - DNA, 75 bp, Artificial sequence
  Avr37
tatataaacctaaccctctctgaccactagcatgaaggtaccttgtcgttgattcaagagggttaggtttatata

SEQ ID NO: 190 - DNA, 76 bp, Artificial sequence
  Avr38
tatataaacctaaccctctctgaccactagcatgaaggtaccttgtcgttgattcagagagggttaggtttatata

SEQ ID NO: 191 - DNA, 77 bp, Artificial sequence
  Avr39
tatataaacctaaccctcttctgaccactagcatgaaggtaccttgtcgttgattcagagagggttaggtttatata

SEQ ID NO: 192 - DNA, 78 bp, Artificial sequence
  Avr40
tatataaacctaaccctcttctgaccactagcatgaaggtaccttgtcgttgattcagtagagggttaggtttatata

SEQ ID NO: 193 - DNA, 5672 bp, Artificial sequence
  pCLS1853
gacggatcgggagatctcccgatcccctatggtgcactctcagtacaatctgctctgatgccgcatagttaagccagtatctgctccctgcttgtgtgttggaggtcgctgagtagtgcgcgagcaaaatttaagctacaacaaggcaaggcttgaccgacaattgcatgaagaatctgcttagggttaggcgttttgcgctgcttcgcgatgtacgggccagatatacgcgttgacattgattattgactagttattaatagtaatcaattacggggtcattagttcatagcccatatatggagttccgcgttacataacttacggtaaatggcccgcctggctgaccgcccaacgacccccgcccattgacgtcaataatgacgtatgttcccatagtaacgccaatagggactttccattgacgtcaatgggtggagtatttacggtaaactgcccacttggcagtacatcaagtgtatcatatgccaagtacgccccctattgacgtcaatgacggtaaatggcccgcctggcattatgcccagtacatgaccttatgggactttcctacttggcagtacatctacgtattagtcatcgctattaccatggtgatgcggttttggcagtacatcaatgggcgtggatagcggtttgactcacggggatttccaagtctccaccccattgacgtcaatgggagtttgttttggcaccaaaatcaacgggactttccaaaatgtcgtaacaactccgccccattgacgcaaatgggcggtaggcgtgtacggtgggaggtctatataagcagagctctctggctaactagagaacccactgcttactggcttatcgaaatgaattcgactcactgttgggagacccaagctggctagttaagctatcacaagtttgtacaaaaaagcaggctggcgcgcctacacagcggccttgccaccatggccaataccaaatataacaaagagttcctgctgtacctggccggctttgtggacggtgacggtagcatcatcgctcagattaaaccaaaccagtcttataagtttaaacatcagctaagcttgacctttcaggtgactcaaaagacccagcgccgttggtttctggacaaactagtggatgaaattggcgttggttacgtacgtgatcgcggatccgtttccaactacatcttaagcgaaatcaagccgctgcacaacttcctgactcaactgcagccgtttctgaaactgaaacagaaacaggcaaacctggttctgaaaattatcgaacagctgccgtctgcaaaagaatccccggacaaattcctggaagtttgtacctgggtggatcagattgcagctctgaacgattctaagacgcgtaaaaccacttctgaaaccgttcgtgctgtgctggacagcctgagcgagaagaagaaatcctccccggcggccgactgataactcgagcgctagcacccagctttcttgtacaaagtggtgatctagagggcccgcggttcgaaggtaagcctatccctaaccctctcctcggtctcgattctacgcgtaccggttagtaatgagtttaaacgggggaggctaactgaaacacggaaggagacaataccggaaggaacccgcgctatgacggcaataaaaagacagaataaaacgcacgggtgttgggtcgtttgttcataaacgcggggttcggtcccagggctggcactctgtcgataccccaccgagaccccattggggccaatacgcccgcgtttcttccttttccccaccccaccccccaagttcgggtgaaggcccagggctcgcagccaacgtcggggcggcaggccctgccatagcagatctgcgcagctggggctctagggggtatccccacgcgccctgtagcggcgcattaagcgcggcgggtgtggtggttacgcgcagcgtgaccgctacacttgccagcgccctagcgcccgctcctttcgctttcttcccttcctttctcgccacgttcgccggctttccccgtcaagctctaaatcggggcatccctttagggttccgatttagtgctttacggcacctcgaccccaaaaaacttgattagggtgatggttcacgtagtgggccatcgccctgatagacggtttttcgccctttgacgttggagtccacgttctttaatagtggactcttgttccaaactggaacaacactcaaccctatctcggtctattcttttgatttataagggattttggggatttcggcctattggttaaaaaatgagctgatttaacaaaaatttaacgcgaattaattctgtggaatgtgtgtcagttagggtgtggaaagtccccaggctccccagcaggcagaagtatgcaaagcatgcatctcaattagtcagcaaccaggtgtggaaagtccccaggctccccagcaggcagaagtatgcaaagcatgcatctcaattagtcagcaaccatagtcccgcccctaactccgcccatcccgcccctaactccgcccagttccgcccattctccgccccatggctgactaattttttttatttatgcagaggccgaggccgcctctgcctctgagctattccagaagtagtgaggaggcttttttggaggcctaggcttttgcaaaaagctcccgggagcttgtatatccattttcggatctgatcagcacgtgttgacaattaatcatcggcatagtatatcggcatagtataatacgacaaggtgaggaactaaaccatggccaagcctttgtctcaagaagaatccaccctcattgaaagagcaacggctacaatcaacagcatccccatctctgaagactacagcgtcgccagcgcagctctctctagcgacggccgcatcttcactggtgtcaatgtatatcattttactgggggaccttgtgcagaactcgtggtgctgggcactgctgctgctgcggcagctggcaacctgacttgtatcgtcgcgatcggaaatgagaacaggggcatcttgagcccctgcggacggtgccgacaggtgcttctcgatctgcatcctgggatcaaagccatagtgaaggacagtgatggacagccgacggcagttgggattcgtgaattgctgccctctggttatgtgtgggagggctaagcacttcgtggccgaggagcaggactgacacgtgctacgagatttcgattccaccgccgccttctatgaaaggttgggcttcggaatcgttttccgggacgccggctggatgatcctccagcgcggggatctcatgctggagttcttcgcccaccccaacttgtttattgcagcttataatggttacaaataaagcaatagcatcacaaatttcacaaataaagcatttttttcactgcattctagttgtggtttgtccaaactcatcaatgtatcttatcatgtctgtataccgtcgacctctagctagagcttggcgtaatcatggtcatagctgtttcctgtgtgaaattgttatccgctcacaattccacacaacatacgagccggaagcataaagtgtaaagcctggggtgcctaatgagtgagctaactcacattaattgcgttgcgctcactgcccgctttccagtcgggaaacctgtcgtgccagctgcattaatgaatcggccaacgcgcggggagaggcggtttgcgtattgggcgctcttccgcttcctcgctcactgactcgctgcgctcggtcgttcggctgcggcgagcggtatcagctcactcaaaggcggtaatacggttatccacagaatcaggggataacgcaggaaagaacatgtgagcaaaaggccagcaaaaggccaggaaccgtaaaaaggccgcgttgctggcgtttttccataggctccgcccccctgacgagcatcacaaaaatcgacgctcaagtcagaggtggcgaaacccgacaggactataaagataccaggcgtttccccctggaagctccctcgtgcgctctcctgttccgaccctgccgcttaccggatacctgtccgcctttctcccttcgggaagcgtggcgctttctcatagctcacgctgtaggtatctcagttcggtgtaggtcgttcgctccaagctgggctgtgtgcacgaaccccccgttcagcccgaccgctgcgccttatccggtaactatcgtcttgagtccaacccggtaagacacgacttatcgccactggcagcagccactggtaacaggattagcagagcgaggtatgtaggcggtgctacagagttcttgaagtggtggcctaactacggctacactagaagaacagtatttggtatctgcgctctgctgaagccagttaccttcggaaaaagagttggtagctcttgatccggcaaacaaaccaccgctggtagcggtttttttgtttgcaagcagcagattacgcgcagaaaaaaaggatctcaagaagatcctttgatcttttctacggggtctgacgctcagtggaacgaaaactcacgttaagggattttggtcatgagattatcaaaaaggatcttcacctagatccttttaaattaaaaatgaagttttaaatcaatctaaagtatatatgagtaaacttggtctgacagttaccaatgcttaatcagtgaggcacctatctcagcgatctgtctatttcgttcatccatagttgcctgactccccgtcgtgtagataactacgatacgggagggcttaccatctggccccagtgctgcaatgataccgcgagacccacgctcaccggctccagatttatcagcaataaaccagccagccggaagggccgagcgcagaagtggtcctgcaactttatccgcctccatccagtctattaattgttgccgggaagctagagtaagtagttcgccagttaatagtttgcgcaacgttgttgccattgctacaggcatcgtggtgtcacgctcgtcgtttggtatggcttcattcagctccggttcccaacgatcaaggcgagttacatgatcccccatgttgtgcaaaaaagcggttagctccttcggtcctccgatcgttgtcagaagtaagttggccgcagtgttatcactcatggttatggcagcactgcataattctcttactgtcatgccatccgtaagatgcttttctgtgactggtgagtactcaaccaagtcattctgagaatagtgtatgcggcgaccgagttgctcttgcccggcgtcaatacgggataataccgcgccacatagcagaactttaaaagtgctcatcattggaaaacgttcttcggggcgaaaactctcaaggatcttaccgctgttgagatccagttcgatgtaacccactcgtgcacccaactgatcttcagcatcttttactttcaccagcgtttctgggtgagcaaaaacaggaaggcaaaatgccgcaaaaaagggaataagggcgacacggaaatgttgaatactcatactcttcctttttcaatattattgaagcatttatcagggttattgtctcatgagcggatacatatttgaatgtatttagaaaaataaacaaataggggttccgcgcacatttccccgaaaagtgccacctgacgtc

SEQ ID NO: 194 - DNA, 2850 bp, Artificial sequence
  pCLS8993
atggtggatctacgcacgctcggctacagccagcagcaacaggagaagatcaaaccgaaggttcgttcgacagtggcgcagcaccacgaggcactggtcggccacgggtttacacacgcgcacatcgttgcgttaagccaacacccggcagcgttagggaccgtcgctgtcaagtatcaggacatgatcgcagcgttgccagaggcgacacacgaagcgatcgttggcgtcggcaaacagtggtccggcgcacgcgctctggaggccttgctcacggtggcgggagagttgagaggtccaccgttacagttggacacaggccaacttctcaagattgcaaaacgtggcggcgtgaccgcagtggaggcagtgcatgcatggcgcaatgcactgacgggtgccccgctcaacttgaccccggagcaggtggtggccatcgccagccacgatggcggcaagcaggcgctggagacggtccagcggctgttgccggtgctgtgccaggcccacggcttgaccccccagcaggtggtggccatcgccagcaatggcggtggcaagcaggcgctggagacggtccagcggctgttgccggtgctgtgccaggcccacggcttgaccccggagcaggtggtggccatcgccagcaatattggtggcaagcaggcgctggagacggtgcaggcgctgttgccggtgctgtgccaggcccacggcttgaccccccagcaggtggtggccatcgccagcaatggcggtggcaagcaggcgctggagacggtccagcggctgttgccggtgctgtgccaggcccacggcttgaccccggagcaggtggtggccatcgccagcaatattggtggcaagcaggcgctggagacggtgcaggcgctgttgccggtgctgtgccaggcccacggcttgaccccggagcaggtggtggccatcgccagcaatattggtggcaagcaggcgctggagacggtgcaggcgctgttgccggtgctgtgccaggcccacggcttgaccccggagcaggtggtggccatcgccagcaatattggtggcaagcaggcgctggagacggtgcaggcgctgttgccggtgctgtgccaggcccacggcttgaccccggagcaggtggtggccatcgccagccacgatggcggcaagcaggcgctggagacggtccagcggctgttgccggtgctgtgccaggcccacggcttgaccccggagcaggtggtggccatcgccagccacgatggcggcaagcaggcgctggagacggtccagcggctgttgccggtgctgtgccaggcccacggcttgaccccccagcaggtggtggccatcgccagcaatggcggtggcaagcaggcgctggagacggtccagcggctgttgccggtgctgtgccaggcccacggcttgaccccggagcaggtggtggccatcgccagcaatattggtggcaagcaggcgctggagacggtgcaggcgctgttgccggtgctgtgccaggcccacggcttgaccccggagcaggtggtggccatcgccagcaatattggtggcaagcaggcgctggagacggtgcaggcgctgttgccggtgctgtgccaggcccacggcttgaccccggagcaggtggtggccatcgccagccacgatggcggcaagcaggcgctggagacggtccagcggctgttgccggtgctgtgccaggcccacggcttgaccccggagcaggtggtggccatcgccagccacgatggcggcaagcaggcgctggagacggtccagcggctgttgccggtgctgtgccaggcccacggcttgaccccggagcaggtggtggccatcgccagccacgatggcggcaagcaggcgctggagacggtccagcggctgttgccggtgctgtgccaggcccacggcttgaccccccagcaggtggtggccatcgccagcaatggcggtggcaagcaggcgctggagacggtccagcggctgttgccggtgctgtgccaggcccacggcttgaccccggagcaggtggtggccatcgccagccacgatggcggcaagcaggcgctggagacggtccagcggctgttgccggtgctgtgccaggcccacggcttgacccctcagcaggtggtggccatcgccagcaatggcggcggcaggccggcgctggagagcattgttgcccagttatctcgccctgatccgggatccaagtctggcatctaccagattaagaacaccctgaataacaaagtgtatgttggatctgccaaggactttgagaaaagatggaagaggcacttcaaggatctggaaaagggttgccacagctccatcaagctccaaaggtctttcaacaaacatggcaatgtctttgagtgctccattttggaagagatcccttatgaaaaggacctcattatagagagggaaaacttctggatcaaggagctgaactcaaaaatcaatggatacaacattgcagatgccacatttggtgacacctgttctactcacccccttaaggaagagatcattaaaaagaggtctgagactgtgaaggctaagatgttgaaactggggcctgatggcagaaaggcactctactctaagccaggtagcaaaaatggaaggtggaaccctgagacccacaagttctgcaaatgtggggtgagaatacagacatcagcctacacttgcagcaagtgtaggaacagatcaggagagaataactcctttttcaaccacaagcattctgacatcaccaagtccaaaatttcaggcaagatgaaaggtcaaggtccatcggccgactga

SEQ ID NO: 195 - DNA, 2811 bp, Artificial sequence
  pCLS8994
atggtggatctacgcacgctcggctacagccagcagcaacaggagaagatcaaaccgaaggttcgttcgacagtggcgcagcaccacgaggcactggtcggccacgggtttacacacgcgcacatcgttgcgttaagccaacacccggcagcgttagggaccgtcgctgtcaagtatcaggacatgatcgcagcgttgccagaggcgacacacgaagcgatcgttggcgtcggcaaacagtggtccggcgcacgcgctctggaggccttgctcacggtggcgggagagttgagaggtccaccgttacagttggacacaggccaacttctcaagattgcaaaacgtggcggcgtgaccgcagtggaggcagtgcatgcatggcgcaatgcactgacgggtgccccgctcaacttgaccccggagcaggtggtggccatcgccagccacgatggcggcaagcaggcgctggagacggtccagcggctgttgccggtgctgtgccaggcccacggcttgaccccccagcaggtggtggccatcgccagcaatggcggtggcaagcaggcgctggagacggtccagcggctgttgccggtgctgtgccaggcccacggcttgaccccggagcaggtggtggccatcgccagcaatattggtggcaagcaggcgctggagacggtgcaggcgctgttgccggtgctgtgccaggcccacggcttgaccccccagcaggtggtggccatcgccagcaatggcggtggcaagcaggcgctggagacggtccagcggctgttgccggtgctgtgccaggcccacggcttgaccccggagcaggtggtggccatcgccagcaatattggtggcaagcaggcgctggagacggtgcaggcgctgttgccggtgctgtgccaggcccacggcttgaccccggagcaggtggtggccatcgccagcaatattggtggcaagcaggcgctggagacggtgcaggcgctgttgccggtgctgtgccaggcccacggcttgaccccggagcaggtggtggccatcgccagcaatattggtggcaagcaggcgctggagacggtgcaggcgctgttgccggtgctgtgccaggcccacggcttgaccccggagcaggtggtggccatcgccagccacgatggcggcaagcaggcgctggagacggtccagcggctgttgccggtgctgtgccaggcccacggcttgaccccggagcaggtggtggccatcgccagccacgatggcggcaagcaggcgctggagacggtccagcggctgttgccggtgctgtgccaggcccacggcttgaccccccagcaggtggtggccatcgccagcaatggcggtggcaagcaggcgctggagacggtccagcggctgttgccggtgctgtgccaggcccacggcttgaccccggagcaggtggtggccatcgccagcaatattggtggcaagcaggcgctggagacggtgcaggcgctgttgccggtgctgtgccaggcccacggcttgaccccggagcaggtggtggccatcgccagcaatattggtggcaagcaggcgctggagacggtgcaggcgctgttgccggtgctgtgccaggcccacggcttgaccccggagcaggtggtggccatcgccagccacgatggcggcaagcaggcgctggagacggtccagcggctgttgccggtgctgtgccaggcccacggcttgaccccggagcaggtggtggccatcgccagccacgatggcggcaagcaggcgctggagacggtccagcggctgttgccggtgctgtgccaggcccacggcttgaccccggagcaggtggtggccatcgccagccacgatggcggcaagcaggcgctggagacggtccagcggctgttgccggtgctgtgccaggcccacggcttgaccccccagcaggtggtggccatcgccagcaatggcggtggcaagcaggcgctggagacggtccagcggctgttgccggtgctgtgccaggcccacggcttgaccccggagcaggtggtggccatcgccagccacgatggcggcaagcaggcgctggagacggtccagcggctgttgccggtgctgtgccaggcccacggcttgacccctcagcaggtggtggccatcgccagcaatggcggcggcaggccggcgctggagagcattgttgcccagttatctcgccctgatccgggatccaagtctggcatctaccagattaagaacaccctgaataacaaagtgtatgttggatctgccaaggactttgagaaaagatggaagaggcacttcaaggatctggaaaagggttgccacagctccatcaagctccaaaggtctttcaacaaacatggcaatgtctttgagtgctccattttggaagagatcccttatgaaaaggacctcattatagagagggaaaacttctggatcaaggagctgaactcaaaaatcaatggatacaacattgcagatgccacatttggtgacacctgttctactcacccccttaaggaagagatcattaaaaagaggtctgagactgtgaaggctaagatgttgaaactggggcctgatggcagaaaggcactctactctaagccaggtagcaaaaatggaaggtggaaccctgagacccacaagttctgcaaatgtggggtgagaatacagacatcagcctacacttgcagcaagtgtaggaacagatcaggagagaataactcctttttcaaccacaagcattctcaaggtccatcggccgactga

SEQ ID NO: 196 - protein, 1321 aa, Artificial sequence
  pCLS7184
MADPIRSRTPSPARELLPGPQPDGVQPTADRGVSPPAGGPLDGLPARRTMSRTRLPSPPAPSPAFSAGSFSDLLRQFDPSLFNTSLFDSLPPFGAHHTEAATGEWDEVQSGLRAADAPPPTMRVAVTAARPPRAKPAPRRRAAQPSDASPAAQVDLRTLGYSQQQQEKIKPKVRSTVAQHHEALVGHGFTHAHIVALSQHPAALGTVAVKYQDMIAALPEATHEAIVGVGKQWSGARALEALLTVAGELRGPPLQLDTGQLLKIAKRGGVTAVEAVHAWRNALTGAPLNLTPEQVVAIASHDGGKQALETVQRLLPVLCQAHGLTPQQVVAIASNGGGKQALETVQRLLPVLCQAHGLTPEQVVAIASNIGGKQALETVQALLPVLCQAHGLTPQQVVAIASNGGGKQALETVQRLLPVLCQAHGLTPEQVVAIASNIGGKQALETVQALLPVLCQAHGLTPEQVVAIASNIGGKQALETVQALLPVLCQAHGLTPEQVVAIASNIGGKQALETVQALLPVLCQAHGLTPEQVVAIASHDGGKQALETVQRLLPVLCQAHGLTPEQVVAIASHDGGKQALETVQRLLPVLCQAHGLTPQQVVAIASNGGGKQALETVQRLLPVLCQAHGLTPEQVVAIASNIGGKQALETVQALLPVLCQAHGLTPEQVVAIASNIGGKQALETVQALLPVLCQAHGLTPEQVVAIASHDGGKQALETVQRLLPVLCQAHGLTPEQVVAIASHDGGKQALETVQRLLPVLCQAHGLTPEQVVAIASHDGGKQALETVQRLLPVLCQAHGLTPQQVVAIASNGGGKQALETVQRLLPVLCQAHGLTPEQVVAIASHDGGKQALETVQRLLPVLCQAHGLTPQQVVAIASNGGGRPALESIVAQLSRPDPALAALTNDHLVALACLGGRPALDAVKKGLPHAPALIKRTNRRIPERTSHRVADHAQVVRVLGFFQCHSHPAQAFDDAMTQFGMSRHGLLQLFRRVGVTELEARSGTLPPASQRWDRILQASGMKRAKPSPTSTQTPDQASLHAFADSLERDLDAPSPMHEGDQTRASSRKRSRSDRAVTGPSAQQSFEVRVPEQRDALHLPLSWRVKRPRTSIGGGLPDPISRSQLVKSELEEKKSELRHKLKYVPHEYIELIEIARNSTQDRILEMKVMEFFMKVYGYRGKHLGGSRKPDGAIYTVGSPIDYGVIVDTKAYSGGYNLPIGQADEMQRYVEENQTRNKHINPNEWWKVYPSSVTEFKFLFVSGHFKGNYKAQLTRLNHITNCNGAVLSVEELLIGGEMIKAGTLTLEEVRRKFNNGEINFAAD

SEQ ID NO: 197 - protein, 97 aa, Artificial sequence
  I-TevI catalytic domain
MKSGIYQIKNTLNNKVYVGSAKDFEKRWKRHFKDLEKGCHSSIKLQRSFNKHGNVFECSILEEIPYAKDLIIERENFWIKELNSKINGYNIADATFG

SEQ ID NO: 198 - protein, 17 aa, Artificial sequence
  I-TevI deletion-intolerant region
DTCSTHPLKEEIIKKRS

SEQ ID NO: 199 - protein, 49 aa, Artificial sequence
  I-TevI deletion-tolerant region
ETVKAKMLKLGPDGRKALYSKPGSKNGRWNPETHKFCKCGVRIQTSAYT

SEQ ID NO: 200 - protein, 7 aa, Artificial sequence
  I-TevI zinc finger
CSKCRNR

SEQ ID NO: 201 - DNA, 8080 bp, Artificial sequence
  pCLS9021
aaaacgccagcaacgcggcctttttacggttcctggccttttgctggccttttgctcacatgttctttcctgcgttatcccctgattctgtggataaccgtattaccgcctttgagtgagctgataccgctcgccgcagccgaacgaccgagcgcagcgagtcagtgagcgaggaagcggaagagcgcctgatgcggtattttctccttacgcatctgtgcggtatttcacaccgcatatatggtgcactctcagtacaatctgctctgatgccgcatagttaagccagtatacactccgctatcgctacgtgactgggtcatggctgcgccccgacacccgccaacacccgctgacgcgccctgacgggcttgtctgctcccggcatccgcttacagacaagctgtgaccgtctccgggagctgcatgtgtcagaggttttcaccgtcatcaccgaaacgcgcgaggcagctgcggtaaagctcatcagcgtggtcgtgaagcgattcacagatgtctgcctgttcatccgcgtccagctcgttgagtttctccagaagcgttaatgtctggcttctgataaagcgggccatgttaagggcggttttttcctgtttggtcactgatgcctccgtgtaagggggatttctgttcatgggggtaatgataccgatgaaacgagagaggatgctcacgatacgggttactgatgatgaacatgcccggttactggaacgttgtgagggtaaacaactggcggtatggatgcggcgggaccagagaaaaatcactcagggtcaatgccagcgcttcgttaatacagatgtaggtgttccacagggtagccagcagcatcctgcgatgcagatccggaacataatggtgcagggcgctgacttccgcgtttccagactttacgaaacacggaaaccgaagaccattcatgttgttgctcaggtcgcagacgttttgcagcagcagtcgcttcacgttcgctcgcgtatcggtgattcattctgctaaccagtaaggcaaccccgccagcctagccgggtcctcaacgacaggagcacgatcatgcgcacccgtggggccgccatgccggcgataatggcctgcttctcgccgaaacgtttggtggcgggaccagtgacgaaggcttgagcgagggcgtgcaagattccgaataccgcaagcgacaggccgatcatcgtcgcgctccagcgaaagcggtcctcgccgaaaatgacccagagcgctgccggcacctgtcctacgagttgcatgataaagaagacagtcataagtgcggcgacgatagtcatgccccgcgcccaccggaaggagctgactgggttgaaggctctcaagggcatcggtcgagatcccggtgcctaatgagtgagctaacttacattaattgcgttgcgctcactgcccgctttccagtcgggaaacctgtcgtgccagctgcattaatgaatcggccaacgcgcggggagaggcggtttgcgtattgggcgccagggtggtttttcttttcaccagtgagacgggcaacagctgattgcccttcaccgcctggccctgagagagttgcagcaagcggtccacgctggtttgccccagcaggcgaaaatcctgtttgatggtggttaacggcgggatataacatgagctgtcttcggtatcgtcgtatcccactaccgagatatccgcaccaacgcgcagcccggactcggtaatggcgcgcattgcgcccagcgccatctgatcgttggcaaccagcatcgcagtgggaacgatgccctcattcagcatttgcatggtttgttgaaaaccggacatggcactccagtcgccttcccgttccgctatcggctgaatttgattgcgagtgagatatttatgccagccagccagacgcagacgcgccgagacagaacttaatgggcccgctaacagcgcgatttgctggtgacccaatgcgaccagatgctccacgcccagtcgcgtaccgtcttcatgggagaaaataatactgttgatgggtgtctggtcagagacatcaagaaataacgccggaacattagtgcaggcagcttccacagcaatggcatcctggtcatccagcggatagttaatgatcagcccactgacgcgttgcgcgagaagattgtgcaccgccgctttacaggcttcgacgccgcttcgttctaccatcgacaccaccacgctggcacccagttgatcggcgcgagatttaatcgccgcgacaatttgcgacggcgcgtgcagggccagactggaggtggcaacgccaatcagcaacgactgtttgcccgccagttgttgtgccacgcggttgggaatgtaattcagctccgccatcgccgcttccactttttcccgcgttttcgcagaaacgtggctggcctggttcaccacgcgggaaacggtctgataagagacaccggcatactctgcgacatcgtataacgttactggtttcacattcaccaccctgaattgactctcttccgggcgctatcatgccataccgcgaaaggttttgcgccattcgatggtgtccgggatctcgacgctctcccttatgcgactcctgcattaggaagcagcccagtagtaggttgaggccgttgagcaccgccgccgcaaggaatggtgcatgcaaggagatggcgcccaacagtcccccggccacggggcctgccaccatacccacgccgaaacaagcgctcatgagcccgaagtggcgagcccgatcttccccatcggtgatgtcggcgatataggcgccagcaaccgcacctgtggcgccggtgatgccggccacgatgcgtccggcgtagaggatcgagatctcgatcccgcgaaattaatacgactcactataggggaattgtgagcggataacaattcccctctagaaataattttgtttaactttaagaaggagatataccatggtggatctacgcacgctcggctacagccagcagcaacaggagaagatcaaaccgaaggttcgttcgacagtggcgcagcaccacgaggcactggtcggccacgggtttacacacgcgcacatcgttgcgttaagccaacacccggcagcgttagggaccgtcgctgtcaagtatcaggacatgatcgcagcgttgccagaggcgacacacgaagcgatcgttggcgtcggcaaacagtggtccggcgcacgcgctctggaggccttgctcacggtggcgggagagttgagaggtccaccgttacagttggacacaggccaacttctcaagattgcaaaacgtggcggcgtgaccgcagtggaggcagtgcatgcatggcgcaatgcactgacgggtgccccgctcaacttgaccccggagcaggtggtggccatcgccagccacgatggcggcaagcaggcgctggagacggtccagcggctgttgccggtgctgtgccaggcccacggcttgaccccccagcaggtggtggccatcgccagcaatggcggtggcaagcaggcgctggagacggtccagcggctgttgccggtgctgtgccaggcccacggcttgaccccggagcaggtggtggccatcgccagcaatattggtggcaagcaggcgctggagacggtgcaggcgctgttgccggtgctgtgccaggcccacggcttgaccccccagcaggtggtggccatcgccagcaatggcggtggcaagcaggcgctggagacggtccagcggctgttgccggtgctgtgccaggcccacggcttgaccccggagcaggtggtggccatcgccagcaatattggtggcaagcaggcgctggagacggtgcaggcgctgttgccggtgctgtgccaggcccacggcttgaccccggagcaggtggtggccatcgccagcaatattggtggcaagcaggcgctggagacggtgcaggcgctgttgccggtgctgtgccaggcccacggcttgaccccggagcaggtggtggccatcgccagcaatattggtggcaagcaggcgctggagacggtgcaggcgctgttgccggtgctgtgccaggcccacggcttgaccccggagcaggtggtggccatcgccagccacgatggcggcaagcaggcgctggagacggtccagcggctgttgccggtgctgtgccaggcccacggcttgaccccggagcaggtggtggccatcgccagccacgatggcggcaagcaggcgctggagacggtccagcggctgttgccggtgctgtgccaggcccacggcttgaccccccagcaggtggtggccatcgccagcaatggcggtggcaagcaggcgctggagacggtccagcggctgttgccggtgctgtgccaggcccacggcttgaccccggagcaggtggtggccatcgccagcaatattggtggcaagcaggcgctggagacggtgcaggcgctgttgccggtgctgtgccaggcccacggcttgaccccggagcaggtggtggccatcgccagcaatattggtggcaagcaggcgctggagacggtgcaggcgctgttgccggtgctgtgccaggcccacggcttgaccccggagcaggtggtggccatcgccagccacgatggcggcaagcaggcgctggagacggtccagcggctgttgccggtgctgtgccaggcccacggcttgaccccggagcaggtggtggccatcgccagccacgatggcggcaagcaggcgctggagacggtccagcggctgttgccggtgctgtgccaggcccacggcttgaccccggagcaggtggtggccatcgccagccacgatggcggcaagcaggcgctggagacggtccagcggctgttgccggtgctgtgccaggcccacggcttgaccccccagcaggtggtggccatcgccagcaatggcggtggcaagcaggcgctggagacggtccagcggctgttgccggtgctgtgccaggcccacggcttgaccccggagcaggtggtggccatcgccagccacgatggcggcaagcaggcgctggagacggtccagcggctgttgccggtgctgtgccaggcccacggcttgacccctcagcaggtggtggccatcgccagcaatggcggcggcaggccggcgctggagagcattgttgcccagttatctcgccctgatccgggatccaagtctggcatctaccagattaagaacaccctgaataacaaagtgtatgttggatctgccaaggactttgagaaaagatggaagaggcacttcaaggatctggaaaagggttgccacagctccatcaagctccaaaggtctttcaacaaacatggcaatgtctttgagtgctccattttggaagagatcccttatgaaaaggacctcattatagagagggaaaacttctggatcaaggagctgaactcaaaaatcaatggatacaacattgcagatgccacatttggtgacacctgttctactcacccccttaaggaagagatcattaaaaagaggtctgagactgtgaaggctaagatgttgaaactggggcctgatggcagaaaggcactctactctaagccaggtagcaaaaatggaaggtggaaccctgagacccacaagttctgcaaatgtggggtgagaatacagacatcagcctacacttgcagcaagtgtaggaacagatcaggagagaataactcctttttcaaccacaagcattctgacatcaccaagtccaaaatttcaggcaagatgaaaggtcaaggtccatcggccgcactcgagcaccaccaccaccaccactgagatccggctgctaacaaagcccgaaaggaagctgagttggctgctgccaccgctgagcaataactagcataaccccttggggcctctaaacgggtcttgaggggttttttgctgaaaggaggaactatatccggattggcgaatgggacgcgccctgtagcggcgcattaagcgcggcgggtgtggtggttacgcgcagcgtgaccgctacacttgccagcgccctagcgcccgctcctttcgctttcttcccttcctttctcgccacgttcgccggctttccccgtcaagctctaaatcgggggctccctttagggttccgatttagtgctttacggcacctcgaccccaaaaaacttgattagggtgatggttcacgtagtgggccatcgccctgatagacggtttttcgccctttgacgttggagtccacgttctttaatagtggactcttgttccaaactggaacaacactcaaccctatctcggtctattcttttgatttataagggattttgccgatttcggcctattggttaaaaaatgagctgatttaacaaaaatttaacgcgaattttaacaaaatattaacgtttacaatttcaggtggcacttttcggggaaatgtgcgcggaacccctatttgtttatttttctaaatacattcaaatatgtatccgctcatgaattaattcttagaaaaactcatcgagcatcaaatgaaactgcaatttattcatatcaggattatcaataccatatttttgaaaaagccgtttctgtaatgaaggagaaaactcaccgaggcagttccataggatggcaagatcctggtatcggtctgcgattccgactcgtccaacatcaatacaacctattaatttcccctcgtcaaaaataaggttatcaagtgagaaatcaccatgagtgacgactgaatccggtgagaatggcaaaagtttatgcatttctttccagacttgttcaacaggccagccattacgctcgtcatcaaaatcactcgcatcaaccaaaccgttattcattcgtgattgcgcctgagcgagacgaaatacgcgatcgctgttaaaaggacaattacaaacaggaatcgaatgcaaccggcgcaggaacactgccagcgcatcaacaatattttcacctgaatcaggatattcttctaatacctggaatgctgttttcccggggatcgcagtggtgagtaaccatgcatcatcaggagtacggataaaatgcttgatggtcggaagaggcataaattccgtcagccagtttagtctgaccatctcatctgtaacatcattggcaacgctacctttgccatgtttcagaaacaactctggcgcatcgggcttcccatacaatcgatagattgtcgcacctgattgcccgacattatcgcgagcccatttatacccatataaatcagcatccatgttggaatttaatcgcggcctagagcaagacgtttcccgttgaatatggctcataacaccccttgtattactgtttatgtaagcagacagttttattgttcatgaccaaaatcccttaacgtgagttttcgttccactgagcgtcagaccccgtagaaaagatcaaaggatcttcttgagatcctttttttctgcgcgtaatctgctgcttgcaaacaaaaaaaccaccgctaccagcggtggtttgtttgccggatcaagagctaccaactctttttccgaaggtaactggcttcagcagagcgcagataccaaatactgtccttctagtgtagccgtagttaggccaccacttcaagaactctgtagcaccgcctacatacctcgctctgctaatcctgttaccagtggctgctgccagtggcgataagtcgtgtcttaccgggttggactcaagacgatagttaccggataaggcgcagcggtcgggctgaacggggggttcgtgcacacagcccagcttggagcgaacgacctacaccgaactgagatacctacagcgtgagctatgagaaagcgccacgcttcccgaagggagaaaggcggacaggtatccggtaagcggcagggtcggaacaggagagcgcacgagggagcttccagggggaaacgcctggtatctttatagtcctgtcgggtttcgccacctctgacttgagcgtcgatttttgtgatgctcgtcaggggggcggagcctatgga

SEQ ID NO: 202 - DNA, 8041 bp, Artificial sequence
  pCLS9022
aaaacgccagcaacgcggcctttttacggttcctggccttttgctggccttttgctcacatgttctttcctgcgttatcccctgattctgtggataaccgtattaccgcctttgagtgagctgataccgctcgccgcagccgaacgaccgagcgcagcgagtcagtgagcgaggaagcggaagagcgcctgatgcggtattttctccttacgcatctgtgcggtatttcacaccgcatatatggtgcactctcagtacaatctgctctgatgccgcatagttaagccagtatacactccgctatcgctacgtgactgggtcatggctgcgccccgacacccgccaacacccgctgacgcgccctgacgggcttgtctgctcccggcatccgcttacagacaagctgtgaccgtctccgggagctgcatgtgtcagaggttttcaccgtcatcaccgaaacgcgcgaggcagctgcggtaaagctcatcagcgtggtcgtgaagcgattcacagatgtctgcctgttcatccgcgtccagctcgttgagtttctccagaagcgttaatgtctggcttctgataaagcgggccatgttaagggcggttttttcctgtttggtcactgatgcctccgtgtaagggggatttctgttcatgggggtaatgataccgatgaaacgagagaggatgctcacgatacgggttactgatgatgaacatgcccggttactggaacgttgtgagggtaaacaactggcggtatggatgcggcgggaccagagaaaaatcactcagggtcaatgccagcgcttcgttaatacagatgtaggtgttccacagggtagccagcagcatcctgcgatgcagatccggaacataatggtgcagggcgctgacttccgcgtttccagactttacgaaacacggaaaccgaagaccattcatgttgttgctcaggtcgcagacgttttgcagcagcagtcgcttcacgttcgctcgcgtatcggtgattcattctgctaaccagtaaggcaaccccgccagcctagccgggtcctcaacgacaggagcacgatcatgcgcacccgtggggccgccatgccggcgataatggcctgcttctcgccgaaacgtttggtggcgggaccagtgacgaaggcttgagcgagggcgtgcaagattccgaataccgcaagcgacaggccgatcatcgtcgcgctccagcgaaagcggtcctcgccgaaaatgacccagagcgctgccggcacctgtcctacgagttgcatgataaagaagacagtcataagtgcggcgacgatagtcatgccccgcgcccaccggaaggagctgactgggttgaaggctctcaagggcatcggtcgagatcccggtgcctaatgagtgagctaacttacattaattgcgttgcgctcactgcccgctttccagtcgggaaacctgtcgtgccagctgcattaatgaatcggccaacgcgcggggagaggcggtttgcgtattgggcgccagggtggtttttcttttcaccagtgagacgggcaacagctgattgcccttcaccgcctggccctgagagagttgcagcaagcggtccacgctggtttgccccagcaggcgaaaatcctgtttgatggtggttaacggcgggatataacatgagctgtcttcggtatcgtcgtatcccactaccgagatatccgcaccaacgcgcagcccggactcggtaatggcgcgcattgcgcccagcgccatctgatcgttggcaaccagcatcgcagtgggaacgatgccctcattcagcatttgcatggtttgttgaaaaccggacatggcactccagtcgccttcccgttccgctatcggctgaatttgattgcgagtgagatatttatgccagccagccagacgcagacgcgccgagacagaacttaatgggcccgctaacagcgcgatttgctggtgacccaatgcgaccagatgctccacgcccagtcgcgtaccgtcttcatgggagaaaataatactgttgatgggtgtctggtcagagacatcaagaaataacgccggaacattagtgcaggcagcttccacagcaatggcatcctggtcatccagcggatagttaatgatcagcccactgacgcgttgcgcgagaagattgtgcaccgccgctttacaggcttcgacgccgcttcgttctaccatcgacaccaccacgctggcacccagttgatcggcgcgagatttaatcgccgcgacaatttgcgacggcgcgtgcagggccagactggaggtggcaacgccaatcagcaacgactgtttgcccgccagttgttgtgccacgcggttgggaatgtaattcagctccgccatcgccgcttccactttttcccgcgttttcgcagaaacgtggctggcctggttcaccacgcgggaaacggtctgataagagacaccggcatactctgcgacatcgtataacgttactggtttcacattcaccaccctgaattgactctcttccgggcgctatcatgccataccgcgaaaggttttgcgccattcgatggtgtccgggatctcgacgctctcccttatgcgactcctgcattaggaagcagcccagtagtaggttgaggccgttgagcaccgccgccgcaaggaatggtgcatgcaaggagatggcgcccaacagtcccccggccacggggcctgccaccatacccacgccgaaacaagcgctcatgagcccgaagtggcgagcccgatcttccccatcggtgatgtcggcgatataggcgccagcaaccgcacctgtggcgccggtgatgccggccacgatgcgtccggcgtagaggatcgagatctcgatcccgcgaaattaatacgactcactataggggaattgtgagcggataacaattcccctctagaaataattttgtttaactttaagaaggagatataccatggtggatctacgcacgctcggctacagccagcagcaacaggagaagatcaaaccgaaggttcgttcgacagtggcgcagcaccacgaggcactggtcggccacgggtttacacacgcgcacatcgttgcgttaagccaacacccggcagcgttagggaccgtcgctgtcaagtatcaggacatgatcgcagcgttgccagaggcgacacacgaagcgatcgttggcgtcggcaaacagtggtccggcgcacgcgctctggaggccttgctcacggtggcgggagagttgagaggtccaccgttacagttggacacaggccaacttctcaagattgcaaaacgtggcggcgtgaccgcagtggaggcagtgcatgcatggcgcaatgcactgacgggtgccccgctcaacttgaccccggagcaggtggtggccatcgccagccacgatggcggcaagcaggcgctggagacggtccagcggctgttgccggtgctgtgccaggcccacggcttgaccccccagcaggtggtggccatcgccagcaatggcggtggcaagcaggcgctggagacggtccagcggctgttgccggtgctgtgccaggcccacggcttgaccccggagcaggtggtggccatcgccagcaatattggtggcaagcaggcgctggagacggtgcaggcgctgttgccggtgctgtgccaggcccacggcttgaccccccagcaggtggtggccatcgccagcaatggcggtggcaagcaggcgctggagacggtccagcggctgttgccggtgctgtgccaggcccacggcttgaccccggagcaggtggtggccatcgccagcaatattggtggcaagcaggcgctggagacggtgcaggcgctgttgccggtgctgtgccaggcccacggcttgaccccggagcaggtggtggccatcgccagcaatattggtggcaagcaggcgctggagacggtgcaggcgctgttgccggtgctgtgccaggcccacggcttgaccccggagcaggtggtggccatcgccagcaatattggtggcaagcaggcgctggagacggtgcaggcgctgttgccggtgctgtgccaggcccacggcttgaccccggagcaggtggtggccatcgccagccacgatggcggcaagcaggcgctggagacggtccagcggctgttgccggtgctgtgccaggcccacggcttgaccccggagcaggtggtggccatcgccagccacgatggcggcaagcaggcgctggagacggtccagcggctgttgccggtgctgtgccaggcccacggcttgaccccccagcaggtggtggccatcgccagcaatggcggtggcaagcaggcgctggagacggtccagcggctgttgccggtgctgtgccaggcccacggcttgaccccggagcaggtggtggccatcgccagcaatattggtggcaagcaggcgctggagacggtgcaggcgctgttgccggtgctgtgccaggcccacggcttgaccccggagcaggtggtggccatcgccagcaatattggtggcaagcaggcgctggagacggtgcaggcgctgttgccggtgctgtgccaggcccacggcttgaccccggagcaggtggtggccatcgccagccacgatggcggcaagcaggcgctggagacggtccagcggctgttgccggtgctgtgccaggcccacggcttgaccccggagcaggtggtggccatcgccagccacgatggcggcaagcaggcgctggagacggtccagcggctgttgccggtgctgtgccaggcccacggcttgaccccggagcaggtggtggccatcgccagccacgatggcggcaagcaggcgctggagacggtccagcggctgttgccggtgctgtgccaggcccacggcttgaccccccagcaggtggtggccatcgccagcaatggcggtggcaagcaggcgctggagacggtccagcggctgttgccggtgctgtgccaggcccacggcttgaccccggagcaggtggtggccatcgccagccacgatggcggcaagcaggcgctggagacggtccagcggctgttgccggtgctgtgccaggcccacggcttgacccctcagcaggtggtggccatcgccagcaatggcggcggcaggccggcgctggagagcattgttgcccagttatctcgccctgatccgggatccaagtctggcatctaccagattaagaacaccctgaataacaaagtgtatgttggatctgccaaggactttgagaaaagatggaagaggcacttcaaggatctggaaaagggttgccacagctccatcaagctccaaaggtctttcaacaaacatggcaatgtctttgagtgctccattttggaagagatcccttatgaaaaggacctcattatagagagggaaaacttctggatcaaggagctgaactcaaaaatcaatggatacaacattgcagatgccacatttggtgacacctgttctactcacccccttaaggaagagatcattaaaaagaggtctgagactgtgaaggctaagatgttgaaactggggcctgatggcagaaaggcactctactctaagccaggtagcaaaaatggaaggtggaaccctgagacccacaagttctgcaaatgtggggtgagaatacagacatcagcctacacttgcagcaagtgtaggaacagatcaggagagaataactcctttttcaaccacaagcattctcaaggtccatcggccgcactcgagcaccaccaccaccaccactgagatccggctgctaacaaagcccgaaaggaagctgagttggctgctgccaccgctgagcaataactagcataaccccttggggcctctaaacgggtcttgaggggttttttgctgaaaggaggaactatatccggattggcgaatgggacgcgccctgtagcggcgcattaagcgcggcgggtgtggtggttacgcgcagcgtgaccgctacacttgccagcgccctagcgcccgctcctttcgctttcttcccttcctttctcgccacgttcgccggctttccccgtcaagctctaaatcgggggctccctttagggttccgatttagtgctttacggcacctcgaccccaaaaaacttgattagggtgatggttcacgtagtgggccatcgccctgatagacggtttttcgccctttgacgttggagtccacgttctttaatagtggactcttgttccaaactggaacaacactcaaccctatctcggtctattcttttgatttataagggattttgccgatttcggcctattggttaaaaaatgagctgatttaacaaaaatttaacgcgaattttaacaaaatattaacgtttacaatttcaggtggcacttttcggggaaatgtgcgcggaacccctatttgtttatttttctaaatacattcaaatatgtatccgctcatgaattaattcttagaaaaactcatcgagcatcaaatgaaactgcaatttattcatatcaggattatcaataccatatttttgaaaaagccgtttctgtaatgaaggagaaaactcaccgaggcagttccataggatggcaagatcctggtatcggtctgcgattccgactcgtccaacatcaatacaacctattaatttcccctcgtcaaaaataaggttatcaagtgagaaatcaccatgagtgacgactgaatccggtgagaatggcaaaagtttatgcatttctttccagacttgttcaacaggccagccattacgctcgtcatcaaaatcactcgcatcaaccaaaccgttattcattcgtgattgcgcctgagcgagacgaaatacgcgatcgctgttaaaaggacaattacaaacaggaatcgaatgcaaccggcgcaggaacactgccagcgcatcaacaatattttcacctgaatcaggatattcttctaatacctggaatgctgttttcccggggatcgcagtggtgagtaaccatgcatcatcaggagtacggataaaatgcttgatggtcggaagaggcataaattccgtcagccagtttagtctgaccatctcatctgtaacatcattggcaacgctacctttgccatgtttcagaaacaactctggcgcatcgggcttcccatacaatcgatagattgtcgcacctgattgcccgacattatcgcgagcccatttatacccatataaatcagcatccatgttggaatttaatcgcggcctagagcaagacgtttcccgttgaatatggctcataacaccccttgtattactgtttatgtaagcagacagttttattgttcatgaccaaaatcccttaacgtgagttttcgttccactgagcgtcagaccccgtagaaaagatcaaaggatcttcttgagatcctttttttctgcgcgtaatctgctgcttgcaaacaaaaaaaccaccgctaccagcggtggtttgtttgccggatcaagagctaccaactctttttccgaaggtaactggcttcagcagagcgcagataccaaatactgtccttctagtgtagccgtagttaggccaccacttcaagaactctgtagcaccgcctacatacctcgctctgctaatcctgttaccagtggctgctgccagtggcgataagtcgtgtcttaccgggttggactcaagacgatagttaccggataaggcgcagcggtcgggctgaacggggggttcgtgcacacagcccagcttggagcgaacgacctacaccgaactgagatacctacagcgtgagctatgagaaagcgccacgcttcccgaagggagaaaggcggacaggtatccggtaagcggcagggtcggaacaggagagcgcacgagggagcttccagggggaaacgcctggtatctttatagtcctgtcgggtttcgccacctctgacttgagcgtcgatttttgtgatgctcgtcaggggggcggagcctatgga

SEQ ID NO: 203 - DNA, 9363 bp, Artificial sequence
  pCLS6615
ttccataggctccgcccccctgacgagcatcacaaaaatcgacgctcaagtcagaggtggcgaaacccgacaggactataaagataccaggcgtttccccctggaagctccctcgtgcgctctcctgttccgaccctgccgcttaccggatacctgtccgcctttctcccttcgggaagcgtggcgctttctcatagctcacgctgtaggtatctcagttcggtgtaggtcgttcgctccaagctgggctgtgtgcacgaaccccccgttcagcccgaccgctgcgccttatccggtaactatcgtcttgagtccaacccggtaagacacgacttatcgccactggcagcagccactggtaacaggattagcagagcgaggtatgtaggcggtgctacagagttcttgaagtggtggcctaactacggctacactagaaggacagtatttggtatctgcgctctgctgaagccagttaccttcggaaaaagagttggtagctcttgatccggcaaacaaaccaccgctggtagcggtggtttttttgtttgcaagcagcagattacgcgcagaaaaaaaggatctcaagaagatcctttgatcttttctacggggtctgacgctcagtggaacgaaaactcacgttaagggattttggtcatgagattatcaaaaaggatcttcacctagatccttttaaattaaaaatgaagttttaaatcaatctaaagtatatatgagtaaacttggtctgacagttaccaatgcttaatcagtgaggcacctatctcagcgatctgtctatttcgttcatccatagttgcctgactccccgtcgtgtagataactacgatacgggagggcttaccatctggccccagtgctgcaatgataccgcgagacccacgctcaccggctccagatttatcagcaataaaccagccagccggaagggccgagcgcagaagtggtcctgcaactttatccgcctccatccagtctattaattgttgccgggaagctagagtaagtagttcgccagttaatagtttgcgcaacgttgttgccattgctacaggcatcgtggtgtcacgctcgtcgtttggtatggcttcattcagctccggttcccaacgatcaaggcgagttacatgatcccccatgttgtgcaaaaaagcggttagctccttcggtcctccgatcgttgtcagaagtaagttggccgcagtgttatcactcatggttatggcagcactgcataattctcttactgtcatgccatccgtaagatgcttttctgtgactggtgagtactcaaccaagtcattctgagaatagtgtatgcggcgaccgagttgctcttgcccggcgtcaatacgggataataccgcgccacatagcagaactttaaaagtgctcatcattggaaaacgttcttcggggcgaaaactctcaaggatcttaccgctgttgagatccagttcgatgtaacccactcgtgcacccaactgatcttcagcatcttttactttcaccagcgtttctgggtgagcaaaaacaggaaggcaaaatgccgcaaaaaagggaataagggcgacacggaaatgttgaatactcatactcttcctttttcaatattattgaagcatttatcagggttattgtctcatgagcggatacatatttgaatgtatttagaaaaataaacaaataggggttccgcgcacatttccccgaaaagtgccacctgacgtccgatcaaaaatcatcgcttcgctgattaattaccccagaaataaggctaaaaaactaatcgcattatcatcctatggttgttaatttgattcgttcatttgaaggtttgtggggccaggttactgccaatttttcctcttcataaccataaaagctagtattgtagaatctttattgttcggagcagtgcggcgcgaggcacatctgcgtttcaggaacgcgaccggtgaagacgaggacgcacggaggagagtcttccttcggagggctgtcacccgctcggcggcttctaatccgtacttcaatatagcaatgagcagttaagcgtattactgaaagttccaaagagaaggtttttttaggctaatcgacctcgagcagatccgccaggcgtgtatatagcgtggatggccaggcaactttagtgctgacacatacaggcatatatatatgtgtgcgacgacacatgatcatatggcatgcatgtgctctgtatgtatataaaactcttgttttcttcttttctctaaatattctttccttatacattaggtcctttgtagcataaattactatacttctatagacacgcaaacacaaatacacagcggccttgccaccatggccaagtctggcatctaccagattaagaacaccctgaataacaaagtgtatgttggatctgccaaggactttgagaaaagatggaagaggcacttcaaggatctggaaaagggttgccacagctccatcaagctccaaaggtctttcaacaaacatggcaatgtctttgagtgctccattttggaagagatcccttatgaaaaggacctcattatagagagggaaaacttctggatcaaggagctgaactcaaaaatcaatggatacaacattgcagatgccacatttggtgacacctgttctactcacccccttaaggaagagatcattaaaaagaggtctgagactgtgaaggctaagatgttgaaactggggcctgatggcagaaaggcactctactctaagccaggtagcaaaaatggaaggtggaaccctgagacccacaagttctgcaaatgtggggtgagaatacagacatcagcctacacttgcagcaagtgtaggaacagatcaggagagaataactcctttttcaaccacaagcattctcaaggtccatctggcaataccaaatataacaaagagttcctgctgtacctggccggctttgtggacggtaacggtagcatcatcgctcagattaaaccaaaccagtcttataagtttaaacatcagctaagcttgacctttcaggtgactcaaaagacccagcgccgttggtttctggacaaactagtggatgaaattggcgttggttacgtacgtgatcgcggatccgtttccgattacattttaagcgaaatcaagccgctgcacaacttcctgactcaactgcagccgtttctgaaactgaaacagaaacaggcaaacctggttctgaaaattatcgaacagctgccgtctgcaaaagaatccccggacaaattcctggaagtttgtacctgggtggatcagattgcagctctgaacgattctaagacgcgtaaaaccacttctgaaaccgttcgtgctgtgctggacagcctgagcgagaagaagaaatcctccccggcggccgactgataactcgagcgatcctctagacgagctcctcgagcctgcagcagctgaagctttggacttcttcgccagaggtttggtcaagtctccaatcaaggttgtcggcttgtctaccttgccagaaatttacgaaaagatggaaaagggtcaaatcgttggtagatacgttgttgacacttctaaataagcgaatttcttatgatttatgatttttattattaaataagttataaaaaaaataagtgtatacaaattttaaagtgactcttaggttttaaaacgaaaattcttattcttgagtaactctttcctgtaggtcaggttgctttctcaggtatagcatgaggtcgctcttattgaccacacctctaccggcatgcaagcttggcgtaatcatggtcatagctgtttcctgtgtgaaattgttatccgctcacaattccacacaacatacgagccggaagcataaagtgtaaagcctggggtgcctaatgagtgagctaactcacattaattgcgttgcgctcactgcccgctttccagtcgggaaacctgtcgtgccagcagatctattacattatgggtggtatgttggaataaaaatcaactatcatctactaactagtatttacgttactagtatattatcatatacggtgttagaagatgacgcaaatgatgagaaatagtcatctaaattagtggaagctgaaacgcaaggattgataatgtaataggatcaatgaatattaacatataaaatgatgataataatatttatagaattgtgtagaattgcagattcccttttatggattcctaaatcctcgaggagaacttctagtatatctacatacctaatattattgccttattaaaaatggaatcccaacaattacatcaaaatccacattctcttcaaaatcaattgtcctgtacttccttgttcatgtgtgttcaaaaacgttatatttataggataattatactctatttctcaacaagtaattggttgtttggccgagcggtctaaggcgcctgattcaagaaatatcttgaccgcagttaactgtgggaatactcaggtatcgtaagatgcaagagttcgaatctcttagcaaccattatttttttcctcaacataacgagaacacacaggggcgctatcgcacagaatcaaattcgatgactggaaattttttgttaatttcagaggtcgcctgacgcatatacctttttcaactgaaaaattgggagaaaaaggaaaggtgagagccgcggaaccggcttttcatatagaatagagaagcgttcatgactaaatgcttgcatcacaatacttgaagttgacaatattatttaaggacctattgttttttccaataggtggttagcaatcgtcttactttctaacttttcttaccttttacatttcagcaatatatatatatatatttcaaggatataccattctaatgtctgcccctaagaagatcgtcgttttgccaggtgaccacgttggtcaagaaatcacagccgaagccattaaggttcttaaagctatttctgatgttcgttccaatgtcaagttcgatttcgaaaatcatttaattggtggtgctgctatcgatgctacaggtgtcccacttccagatgaggcgctggaagcctccaagaaggttgatgccgttttgttaggtgctgtgggtggtcctaaatggggtaccggtagtgttagacctgaacaaggtttactaaaaatccgtaaagaacttcaattgtacgccaacttaagaccatgtaactttgcatccgactctcttttagacttatctccaatcaagccacaatttgctaaaggtactgacttcgttgttgtcagagaattagtgggaggtatttactttggtaagagaaaggaagacgatggtgatggtgtcgcttgggatagtgaacaatacaccgttccagaagtgcaaagaatcacaagaatggccgctttcatggccctacaacatgagccaccattgcctatttggtccttggataaagctaatgttttggcctcttcaagattatggagaaaaactgtggaggaaaccatcaagaacgaattccctacattgaaggttcaacatcaattgattgattctgccgccatgatcctagttaagaacccaacccacctaaatggtattataatcaccagcaacatgtttggtgatatcatctccgatgaagcctccgttatcccaggttccttgggtttgttgccatctgcgtccttggcctctttgccagacaagaacaccgcatttggtttgtacgaaccatgccacggttctgctccagatttgccaaagaataaggtcaaccctatcgccactatcttgtctgctgcaatgatgttgaaattgtcattgaacttgcctgaagaaggtaaggccattgaagatgcagttaaaaaggttttggatgcaggtatcagaactggtgatttaggtggttccaacagtaccacggaagtcggtgatgctgtcgccgaagaagttaagaaaatccttgcttaaaaagattctctttttttatgatatttgtacataaactttataaatgaaattcataatagaaacgacacgaaattacaaaatggaatatgttcatagggtagacgaaactatatacgcaatctacatacatttatcaagaaggagaaaaaggaggatgtaaaggaatacaggtaagcaaattgatactaatggctcaacgtgataaggaaaaagaattgcactttaacattaatattgacaaggaggagggcaccacacaaaaagttaggtgtaacagaaaatcatgaaactatgattcctaatttatatattggaggattttctctaaaaaaaaaaaaatacaacaaataaaaaacactcaatgacctgaccatttgatggagtttaagtcaataccttcttgaaccatttcccataatggtgaaagttccctcaagaattttactctgtcagaaacggccttaacgacgtagtcgacctcctcttcagtactaaatctaccaataccaaatctgatggaagaatgggctaatgcatcatccttacccagcgcatgtaaaacataagaaggttctagggaagcagatgtacaggctgaacccgaggataatgcgatatcccttagtgccatcaataaagattctccttccacgtaggcgaaagaaacgttaacacaccctggataacgatgatctggagatccgttcaacgtggtatgttcagcggataatagacctttgactaatttatcggatagtcttttgatgtgagcttggtcgttgtcaaattctttcttcatcaatctcgcagcttcaccaaatcccgctaccaatgggggggccaaagtaccagatctgctgcattaatgaatcggccaacgcgcggggagaggcggtttgcgtattgggcgctcttccgcttcctcgctcactgactcgctgcgctcggtcgttcggctgcggcgagcggtatcagcatcgatgaattccacggactatagactatactagtatactccgtctactgtacgatacacttccgctcaggtccttgtcctttaacgaggccttaccactcttttgttactctattgatccagctcagcaaaggcagtgtgatctaagattctatcttcgcgatgtagtaaaactagctagaccgagaaagagactagaaatgcaaaaggcacttctacaatggctgccatcattattatccgatgtgacgctgcagcttctcaatgatattcgaatacgctttgaggagatacagcctaatatccgacaaactgttttacagatttacgatcgtacttgttacccatcattgaattttgaacatccgaacctgggagttttccctgaaacagatagtatatttgaacctgtataataatatatagtctagcgctttacggaagacaatgtatgtatttcggttcctggagaaactattgcatctattgcataggtaatcttgcacgtcgcatccccggttcattttctgcgtttccatcttgcacttcaatagcatatctttgttaacgaagcatctgtgcttcattttgtagaacaaaaatgcaacgcgagagcgctaatttttcaaacaaagaatctgagctgcatttttacagaacagaaatgcaacgcgaaagcgctattttaccaacgaagaatctgtgcttcatttttgtaaaacaaaaatgcaacgcgagagcgctaatttttcaaacaaagaatctgagctgcatttttacagaacagaaatgcaacgcgagagcgctattttaccaacaaagaatctatacttcttttttgttctacaaaaatgcatcccgagagcgctatttttctaacaaagcatcttagattactttttttctcctttgtgcgctctataatgcagtctcttgataactttttgcactgtaggtccgttaaggttagaagaaggctactttggtgtctattttctcttccataaaaaaagcctgactccacttcccgcgtttactgattactagcgaagctgcgggtgcattttttcaagataaaggcatccccgattatattctataccgatgtggattgcgcatactttgtgaacagaaagtgatagcgttgatgattcttcattggtcagaaaattatgaacggtttcttctattttgtctctatatactacgtataggaaatgtttacattttcgtattgttttcgattcactctatgaatagttcttactacaatttttttgtctaaagagtaatactagagataaacataaaaaatgtagaggtcgagtttagatgcaagttcaaggagcgaaaggtggatgggtaggttatatagggatatagcacagagatatatagcaaagagatacttttgagcaatgtttgtggaagcggtattcgcaatattttagtagctcgttacagtccggtgcgtttttggttttttgaaagtgcgtcttcagagcgcttttggttttcaaaagcgctctgaagttcctatactttctagagaataggaacttcggaataggaacttcaaagcgtttccgaaaacgagcgcttccgaaaatgcaacgcgagctgcgcacatacagctcactgttcacgtcgcacctatatctgcgtgttgcctgtatatatatatacatgagaagaacggcatagtgcgtgtttatgcttaaatgcgtacttatatgcgtctatttatgtaggatgaaaggtagtctagtacctcctgtgatattatcccattccatgcggggtatcgtatgcttccttcagcactaccctttagctgttctatatgctgccactcctcaattggattagtctcatccttcaatgctatcatttcctttgatattggatcatatgcatagtaccgagaaactagtgcgaagtagtgatcaggtattgctgttatctgatgagtatacgttgtcctggccacggcagaagcacgcttatcgctccaatttcccacaacattagtcaactccgttaggcccttcattgaaagaaatgaggtcatcaaatgtcttccaatgtgagattttgggccattttttatagcaaagattgaataaggcgcatttttcttcaaagctttattgtacgatctgactaagttatcttttaataattggtattcctgtttattgcttgaagaattgccggtcctatttactcgttttaggactggttcagaattcatcgatgctcactcaaaggtcggtaatacggttatccacagaatcaggggataacgcaggaaagaacatgtgagcaaaaggccagcaaaaggccaggaaccgtaaaaaggccgcgttgctggcgttt

SEQ ID NO: 204 - protein, 11 aa, Artificial sequence
  C11 Cter
SIVAQLSRPDP

SEQ ID NO: 205 - protein, 29 aa, Artificial sequence
  C28 Cter
SIVAQLSRPDPALAALTNDHLVALACLGG

SEQ ID NO: 206 - protein, 40 aa, Artificial sequence
  C40 Cter
SIVAQLSRPDPALAALTNDHLVALACLGGRPALDAVKKGL

SEQ ID NO: 207 - protein, 64 aa, Artificial sequence
  C64 Cter
SIVAQLSRPDPALAALTNDHLVALACLGGRPALDAVKKGLPHAPALIKRTNRRIPERTSHRVAD

SEQ ID NO: 208 - protein, 114 aa, Artificial sequence
  C115 Cter
SIVAQLSRPDPALAALTNDHLVALACLGGRPALDAVKKGLPHAPALIKRTNRRIPERTSHRVADHAQVVRVLGFFQCHSHPAQAFDDAMTQFGMSRHGLLQLFRRVGVTELEAR

SEQ ID NO: 209 - protein, 173 aa, Artificial sequence
  C172 Cter
SIVAQLSRPDPALAALTNDHLVALACLGGRPALDAVKKGLPHAPALIKRTNRRIPERTSHRVADHAQVVRVLGFFQCHSHPAQAFDDAMTQFGMSRHGLLQLFRRVGVTELEARSGTLPPASQRWDRILQASGMKRAKPSPTSTQTPDQASLHAFADSLERDLDAPSPMHEGD

SEQ ID NO: 210 - protein, 231 aa, Artificial sequence
  WT Cter
SIVAQLSRPDPALAALTNDHLVALACLGGRPALDAVKKGLPHAPALIKRTNRRIPERTSHRVADHAQVVRVLGFFQCHSHPAQAFDDAMTQFGMSRHGLLQLFRRVGVTELEARSGTLPPASQRWDRILQASGMKRAKPSPTSTQTPDQASLHAFADSLERDLDAPSPMHEGDQTRASSRKRSRSDRAVTGPSAQQSFEVRVPEQRDALHLPLSWRVKRPRTSIGGGLPDP

SEQ ID NO: 211 - protein, 1094 aa, Artificial sequence
  pCLS7821
MADPIRSRTPSPARELLPGPQPDGVQPTADRGVSPPAGGPLDGLPARRTMSRTRLPSPPAPSPAFSAGSFSDLLRQFDPSLFNTSLFDSLPPFGAHHTEAATGEWDEVQSGLRAADAPPPTMRVAVTAARPPRAKPAPRRRAAQPSDASPAAQVDLRTLGYSQQQQEKIKPKVRSTVAQHHEALVGHGFTHAHIVALSQHPAALGTVAVKYQDMIAALPEATHEAIVGVGKQWSGARALEALLTVAGELRGPPLQLDTGQLLKIAKRGGVTAVEAVHAWRNALTGAPLNLTPEQVVAIASHDGGKQALETVQRLLPVLCQAHGLTPQQVVAIASNGGGKQALETVQRLLPVLCQAHGLTPEQVVAIASNIGGKQALETVQALLPVLCQAHGLTPQQVVAIASNGGGKQALETVQRLLPVLCQAHGLTPEQVVAIASNIGGKQALETVQALLPVLCQAHGLTPEQVVAIASNIGGKQALETVQALLPVLCQAHGLTPEQVVAIASNIGGKQALETVQALLPVLCQAHGLTPEQVVAIASHDGGKQALETVQRLLPVLCQAHGLTPEQVVAIASHDGGKQALETVQRLLPVLCQAHGLTPQQVVAIASNGGGKQALETVQRLLPVLCQAHGLTPEQVVAIASNIGGKQALETVQALLPVLCQAHGLTPEQVVAIASNIGGKQALETVQALLPVLCQAHGLTPEQVVAIASHDGGKQALETVQRLLPVLCQAHGLTPEQVVAIASHDGGKQALETVQRLLPVLCQAHGLTPEQVVAIASHDGGKQALETVQRLLPVLCQAHGLTPQQVVAIASNGGGKQALETVQRLLPVLCQAHGLTPEQVVAIASHDGGKQALETVQRLLPVLCQAHGLTPQQVVAIASNGGGRPALESGDPISRSQLVKSELEEKKSELRHKLKYVPHEYIELIEIARNSTQDRILEMKVMEFFMKVYGYRGKHLGGSRKPDGAIYTVGSPIDYGVIVDTKAYSGGYNLPIGQADEMQRYVEENQTRNKHINPNEWWKVYPSSVTEFKFLFVSGHFKGNYKAQLTRLNHITNCNGAVLSVEELLIGGEMIKAGTLTLEEVRRKFNNGEINFAAD

SEQ ID NO: 212 - protein, 1110 aa, Artificial sequence
  pCLS7803
MADPIRSRTPSPARELLPGPQPDGVQPTADRGVSPPAGGPLDGLPARRTMSRTRLPSPPAPSPAFSAGSFSDLLRQFDPSLFNTSLFDSLPPFGAHHTEAATGEWDEVQSGLRAADAPPPTMRVAVTAARPPRAKPAPRRRAAQPSDASPAAQVDLRTLGYSQQQQEKIKPKVRSTVAQHHEALVGHGFTHAHIVALSQHPAALGTVAVKYQDMIAALPEATHEAIVGVGKQWSGARALEALLTVAGELRGPPLQLDTGQLLKIAKRGGVTAVEAVHAWRNALTGAPLNLTPEQVVAIASHDGGKQALETVQRLLPVLCQAHGLTPQQVVAIASNGGGKQALETVQRLLPVLCQAHGLTPEQVVAIASNIGGKQALETVQALLPVLCQAHGLTPQQVVAIASNGGGKQALETVQRLLPVLCQAHGLTPEQVVAIASNIGGKQALETVQALLPVLCQAHGLTPEQVVAIASNIGGKQALETVQALLPVLCQAHGLTPEQVVAIASNIGGKQALETVQALLPVLCQAHGLTPEQVVAIASHDGGKQALETVQRLLPVLCQAHGLTPEQVVAIASHDGGKQALETVQRLLPVLCQAHGLTPQQVVAIASNGGGKQALETVQRLLPVLCQAHGLTPEQVVAIASNIGGKQALETVQALLPVLCQAHGLTPEQVVAIASNIGGKQALETVQALLPVLCQAHGLTPEQVVAIASHDGGKQALETVQRLLPVLCQAHGLTPEQVVAIASHDGGKQALETVQRLLPVLCQAHGLTPEQVVAIASHDGGKQALETVQRLLPVLCQAHGLTPQQVVAIASNGGGKQALETVQRLLPVLCQAHGLTPEQVVAIASHDGGKQALETVQRLLPVLCQAHGLTPQQVVAIASNGGGRPALESIVAQLSRPDPSGSGSGGDPISRSQLVKSELEEKKSELRHKLKYVPHEYIELIEIARNSTQDRILEMKVMEFFMKVYGYRGKHLGGSRKPDGAIYTVGSPIDYGVIVDTKAYSGGYNLPIGQADEMQRYVEENQTRNKHINPNEWWKVYPSSVTEFKFLFVSGHFKGNYKAQLTRLNHITNCNGAVLSVEELLIGGEMIKAGTLTLEEVRRKFNNGEINFAAD

SEQ ID NO: 213 - protein, 1121 aa, Artificial sequence
  pCLS7807
MADPIRSRTPSPARELLPGPQPDGVQPTADRGVSPPAGGPLDGLPARRTMSRTRLPSPPAPSPAFSAGSFSDLLRQFDPSLFNTSLFDSLPPFGAHHTEAATGEWDEVQSGLRAADAPPPTMRVAVTAARPPRAKPAPRRRAAQPSDASPAAQVDLRTLGYSQQQQEKIKPKVRSTVAQHHEALVGHGFTHAHIVALSQHPAALGTVAVKYQDMIAALPEATHEAIVGVGKQWSGARALEALLTVAGELRGPPLQLDTGQLLKIAKRGGVTAVEAVHAWRNALTGAPLNLTPEQVVAIASHDGGKQALETVQRLLPVLCQAHGLTPQQVVAIASNGGGKQALETVQRLLPVLCQAHGLTPEQVVAIASNIGGKQALETVQALLPVLCQAHGLTPQQVVAIASNGGGKQALETVQRLLPVLCQAHGLTPEQVVAIASNIGGKQALETVQALLPVLCQAHGLTPEQVVAIASNIGGKQALETVQALLPVLCQAHGLTPEQVVAIASNIGGKQALETVQALLPVLCQAHGLTPEQVVAIASHDGGKQALETVQRLLPVLCQAHGLTPEQVVAIASHDGGKQALETVQRLLPVLCQAHGLTPQQVVAIASNGGGKQALETVQRLLPVLCQAHGLTPEQVVAIASNIGGKQALETVQALLPVLCQAHGLTPEQVVAIASNIGGKQALETVQALLPVLCQAHGLTPEQVVAIASHDGGKQALETVQRLLPVLCQAHGLTPEQVVAIASHDGGKQALETVQRLLPVLCQAHGLTPEQVVAIASHDGGKQALETVQRLLPVLCQAHGLTPQQVVAIASNGGGKQALETVQRLLPVLCQAHGLTPEQVVAIASHDGGKQALETVQRLLPVLCQAHGLTPQQVVAIASNGGGRPALESIVAQLSRPDPALAALTNDHLVALACLGGDPISRSQLVKSELEEKKSELRHKLKYVPHEYIELIEIARNSTQDRILEMKVMEFFMKVYGYRGKHLGGSRKPDGAIYTVGSPIDYGVIVDTKAYSGGYNLPIGQADEMQRYVEENQTRNKHINPNEWWKVYPSSVTEFKFLFVSGHFKGNYKAQLTRLNHITNCNGAVLSVEELLIGGEMIKAGTLTLEEVRRKFNNGEINFAAD

SEQ ID NO: 214 - protein, 1133 aa, Artificial sequence
  pCLS7809
MADPIRSRTPSPARELLPGPQPDGVQPTADRGVSPPAGGPLDGLPARRTMSRTRLPSPPAPSPAFSAGSFSDLLRQFDPSLFNTSLFDSLPPFGAHHTEAATGEWDEVQSGLRAADAPPPTMRVAVTAARPPRAKPAPRRRAAQPSDASPAAQVDLRTLGYSQQQQEKIKPKVRSTVAQHHEALVGHGFTHAHIVALSQHPAALGTVAVKYQDMIAALPEATHEAIVGVGKQWSGARALEALLTVAGELRGPPLQLDTGQLLKIAKRGGVTAVEAVHAWRNALTGAPLNLTPEQVVAIASHDGGKQALETVQRLLPVLCQAHGLTPQQVVAIASNGGGKQALETVQRLLPVLCQAHGLTPEQVVAIASNIGGKQALETVQALLPVLCQAHGLTPQQVVAIASNGGGKQALETVQRLLPVLCQAHGLTPEQVVAIASNIGGKQALETVQALLPVLCQAHGLTPEQVVAIASNIGGKQALETVQALLPVLCQAHGLTPEQVVAIASNIGGKQALETVQALLPVLCQAHGLTPEQVVAIASHDGGKQALETVQRLLPVLCQAHGLTPEQVVAIASHDGGKQALETVQRLLPVLCQAHGLTPQQVVAIASNGGGKQALETVQRLLPVLCQAHGLTPEQVVAIASNIGGKQALETVQALLPVLCQAHGLTPEQVVAIASNIGGKQALETVQALLPVLCQAHGLTPEQVVAIASHDGGKQALETVQRLLPVLCQAHGLTPEQVVAIASHDGGKQALETVQRLLPVLCQAHGLTPEQVVAIASHDGGKQALETVQRLLPVLCQAHGLTPQQVVAIASNGGGKQALETVQRLLPVLCQAHGLTPEQVVAIASHDGGKQALETVQRLLPVLCQAHGLTPQQVVAIASNGGGRPALESIVAQLSRPDPALAALTNDHLVALACLGGRPALDAVKKGLGDPISRSQLVKSELEEKKSELRHKLKYVPHEYIELIEIARNSTQDRILEMKVMEFFMKVYGYRGKHLGGSRKPDGAIYTVGSPIDYGVIVDTKAYSGGYNLPIGQADEMQRYVEENQTRNKHINPNEWWKVYPSSVTEFKFLFVSGHFKGNYKAQLTRLNHITNCNGAVLSVEELLIGGEMIKAGTLTLEEVRRKFNNGEINFAAD

SEQ ID NO: 215 - protein, 1157 aa, Artificial sequence
  pCLS7811
MADPIRSRTPSPARELLPGPQPDGVQPTADRGVSPPAGGPLDGLPARRTMSRTRLPSPPAPSPAFSAGSFSDLLRQFDPSLFNTSLFDSLPPFGAHHTEAATGEWDEVQSGLRAADAPPPTMRVAVTAARPPRAKPAPRRRAAQPSDASPAAQVDLRTLGYSQQQQEKIKPKVRSTVAQHHEALVGHGFTHAHIVALSQHPAALGTVAVKYQDMIAALPEATHEAIVGVGKQWSGARALEALLTVAGELRGPPLQLDTGQLLKIAKRGGVTAVEAVHAWRNALTGAPLNLTPEQVVAIASHDGGKQALETVQRLLPVLCQAHGLTPQQVVAIASNGGGKQALETVQRLLPVLCQAHGLTPEQVVAIASNIGGKQALETVQALLPVLCQAHGLTPQQVVAIASNGGGKQALETVQRLLPVLCQAHGLTPEQVVAIASNIGGKQALETVQALLPVLCQAHGLTPEQVVAIASNIGGKQALETVQALLPVLCQAHGLTPEQVVAIASNIGGKQALETVQALLPVLCQAHGLTPEQVVAIASHDGGKQALETVQRLLPVLCQAHGLTPEQVVAIASHDGGKQALETVQRLLPVLCQAHGLTPQQVVAIASNGGGKQALETVQRLLPVLCQAHGLTPEQVVAIASNIGGKQALETVQALLPVLCQAHGLTPEQVVAIASNIGGKQALETVQALLPVLCQAHGLTPEQVVAIASHDGGKQALETVQRLLPVLCQAHGLTPEQVVAIASHDGGKQALETVQRLLPVLCQAHGLTPEQVVAIASHDGGKQALETVQRLLPVLCQAHGLTPQQVVAIASNGGGKQALETVQRLLPVLCQAHGLTPEQVVAIASHDGGKQALETVQRLLPVLCQAHGLTPQQVVAIASNGGGRPALESIVAQLSRPDPALAALTNDHLVALACLGGRPALDAVKKGLPHAPALIKRTNRRIPERTSHRVADGDPISRSQLVKSELEEKKSELRHKLKYVPHEYIELIEIARNSTQDRILEMKVMEFFMKVYGYRGKHLGGSRKPDGAIYTVGSPIDYGVIVDTKAYSGGYNLPIGQADEMQRYVEENQTRNKHINPNEWWKVYPSSVTEFKFLFVSGHFKGNYKAQLTRLNHITNCNGAVLSVEELLIGGEMIKAGTLTLEEVRRKFNNGEINFAAD

SEQ ID NO: 216 - protein, 1208 aa, Artificial sequence
  pCLS7813
MADPIRSRTPSPARELLPGPQPDGVQPTADRGVSPPAGGPLDGLPARRTMSRTRLPSPPAPSPAFSAGSFSDLLRQFDPSLFNTSLFDSLPPFGAHHTEAATGEWDEVQSGLRAADAPPPTMRVAVTAARPPRAKPAPRRRAAQPSDASPAAQVDLRTLGYSQQQQEKIKPKVRSTVAQHHEALVGHGFTHAHIVALSQHPAALGTVAVKYQDMIAALPEATHEAIVGVGKQWSGARALEALLTVAGELRGPPLQLDTGQLLKIAKRGGVTAVEAVHAWRNALTGAPLNLTPEQVVAIASHDGGKQALETVQRLLPVLCQAHGLTPQQVVAIASNGGGKQALETVQRLLPVLCQAHGLTPEQVVAIASNIGGKQALETVQALLPVLCQAHGLTPQQVVAIASNGGGKQALETVQRLLPVLCQAHGLTPEQVVAIASNIGGKQALETVQALLPVLCQAHGLTPEQVVAIASNIGGKQALETVQALLPVLCQAHGLTPEQVVAIASNIGGKQALETVQALLPVLCQAHGLTPEQVVAIASHDGGKQALETVQRLLPVLCQAHGLTPEQVVAIASHDGGKQALETVQRLLPVLCQAHGLTPQQVVAIASNGGGKQALETVQRLLPVLCQAHGLTPEQVVAIASNIGGKQALETVQALLPVLCQAHGLTPEQVVAIASNIGGKQALETVQALLPVLCQAHGLTPEQVVAIASHDGGKQALETVQRLLPVLCQAHGLTPEQVVAIASHDGGKQALETVQRLLPVLCQAHGLTPEQVVAIASHDGGKQALETVQRLLPVLCQAHGLTPQQVVAIASNGGGKQALETVQRLLPVLCQAHGLTPEQVVAIASHDGGKQALETVQRLLPVLCQAHGLTPQQVVAIASNGGGRPALESIVAQLSRPDPALAALTNDHLVALACLGGRPALDAVKKGLPHAPALIKRTNRRIPERTSHRVADHAQVVRVLGFFQCHSHPAQAFDDAMTQFGMSRHGLLQLFRRVGVTELEARTGDPISRSQLVKSELEEKKSELRHKLKYVPHEYIELIEIARNSTQDRILEMKVMEFFMKVYGYRGKHLGGSRKPDGAIYTVGSPIDYGVIVDTKAYSGGYNLPIGQADEMQRYVEENQTRNKHINPNEWWKVYPSSVTEFKFLFVSGHFKGNYKAQLTRLNHITNCNGAVLSVEELLIGGEMIKAGTLTLEEVRRKFNNGEINFAAD

SEQ ID NO: 217 - protein, 1264 aa, Artificial sequence
  pCLS7817
MADPIRSRTPSPARELLPGPQPDGVQPTADRGVSPPAGGPLDGLPARRTMSRTRLPSPPAPSPAFSAGSFSDLLRQFDPSLFNTSLFDSLPPFGAHHTEAATGEWDEVQSGLRAADAPPPTMRVAVTAARPPRAKPAPRRRAAQPSDASPAAQVDLRTLGYSQQQQEKIKPKVRSTVAQHHEALVGHGFTHAHIVALSQHPAALGTVAVKYQDMIAALPEATHEAIVGVGKQWSGARALEALLTVAGELRGPPLQLDTGQLLKIAKRGGVTAVEAVHAWRNALTGAPLNLTPEQVVAIASHDGGKQALETVQRLLPVLCQAHGLTPQQVVAIASNGGGKQALETVQRLLPVLCQAHGLTPEQVVAIASNIGGKQALETVQALLPVLCQAHGLTPQQVVAIASNGGGKQALETVQRLLPVLCQAHGLTPEQVVAIASNIGGKQALETVQALLPVLCQAHGLTPEQVVAIASNIGGKQALETVQALLPVLCQAHGLTPEQVVAIASNIGGKQALETVQALLPVLCQAHGLTPEQVVAIASHDGGKQALETVQRLLPVLCQAHGLTPEQVVAIASHDGGKQALETVQRLLPVLCQAHGLTPQQVVAIASNGGGKQALETVQRLLPVLCQAHGLTPEQVVAIASNIGGKQALETVQALLPVLCQAHGLTPEQVVAIASNIGGKQALETVQALLPVLCQAHGLTPEQVVAIASHDGGKQALETVQRLLPVLCQAHGLTPEQVVAIASHDGGKQALETVQRLLPVLCQAHGLTPEQVVAIASHDGGKQALETVQRLLPVLCQAHGLTPQQVVAIASNGGGKQALETVQRLLPVLCQAHGLTPEQVVAIASHDGGKQALETVQRLLPVLCQAHGLTPQQVVAIASNGGGRPALESIVAQLSRPDPALAALTNDHLVALACLGGRPALDAVKKGLPHAPALIKRTNRRIPERTSHRVADHAQVVRVLGFFQCHSHPAQAFDDAMTQFGMSRHGLLQLFRRVGVTELEARSGTLPPASQRWDRILQASGMKRAKPSPTSTQTPDQASLHAFADSLERDLDAPSPMHEGDPISRSQLVKSELEEKKSELRHKLKYVPHEYIELIEIARNSTQDRILEMKVMEFFMKVYGYRGKHLGGSRKPDGAIYTVGSPIDYGVIVDTKAYSGGYNLPIGQADEMQRYVEENQTRNKHINPNEWWKVYPSSVTEFKFLFVSGHFKGNYKAQLTRLNHITNCNGAVLSVEELLIGGEMIKAGTLTLEEVRRKFNNGEINFAAD

SEQ ID NO: 218 - DNA, 5837 bp, Artificial sequence
  pCLS9012
gggcggagcctatggaaaaacgccagcaacgcggcctttttacggttcctggccttttgctggccttttgctcacatggtctttcctgcgttatcccctgattctgtggataaccgtattaccgcctttgagtgagctgataccgctcgccgcagccgaacgaccgagcgcagcgagtcagtgagcgaggaagcggagagcgcccaatacgcaaaccgcctctccccgcgcgttggccgattcattaatgcagctggcacgacaggtttcccgactggaaagcgggcagtgagcgcaacgcaattaatgtgagttagctcactcattaggcaccccaggctttacactttatgcttccggctcgtatgttgtgtggaattgtgagcggataacaatttcacacaggaaacagctatgaccatgattacgccaagcgcgtcaattaaccctcactaaagggaacaaaagctgttaattaagcgcgccacacgcaaacacaaatacacagcggccttgccaccatggtggatctacgcacgctcggctacagccagcagcaacaggagaagatcaaaccgaaggttcgttcgacagtggcgcagcaccacgaggcactggtcggccacgggtttacacacgcgcacatcgttgcgttaagccaacacccggcagcgttagggaccgtcgctgtcaagtatcaggacatgatcgcagcgttgccagaggcgacacacgaagcgatcgttggcgtcggcaaacagtggtccggcgcacgcgctctggaggccttgctcacggtggcgggagagttgagaggtccaccgttacagttggacacaggccaacttctcaagattgcaaaacgtggcggcgtgaccgcagtggaggcagtgcatgcatggcgcaatgcactgacgggtgccccgctcaacttgaccccggagcaggtggtggccatcgccagccacgatggcggcaagcaggcgctggagacggtccagcggctgttgccggtgctgtgccaggcccacggcttgaccccccagcaggtggtggccatcgccagcaatggcggtggcaagcaggcgctggagacggtccagcggctgttgccggtgctgtgccaggcccacggcttgaccccggagcaggtggtggccatcgccagcaatattggtggcaagcaggcgctggagacggtgcaggcgctgttgccggtgctgtgccaggcccacggcttgaccccccagcaggtggtggccatcgccagcaatggcggtggcaagcaggcgctggagacggtccagcggctgttgccggtgctgtgccaggcccacggcttgaccccggagcaggtggtggccatcgccagcaatattggtggcaagcaggcgctggagacggtgcaggcgctgttgccggtgctgtgccaggcccacggcttgaccccggagcaggtggtggccatcgccagcaatattggtggcaagcaggcgctggagacggtgcaggcgctgttgccggtgctgtgccaggcccacggcttgaccccggagcaggtggtggccatcgccagcaatattggtggcaagcaggcgctggagacggtgcaggcgctgttgccggtgctgtgccaggcccacggcttgaccccggagcaggtggtggccatcgccagccacgatggcggcaagcaggcgctggagacggtccagcggctgttgccggtgctgtgccaggcccacggcttgaccccggagcaggtggtggccatcgccagccacgatggcggcaagcaggcgctggagacggtccagcggctgttgccggtgctgtgccaggcccacggcttgaccccccagcaggtggtggccatcgccagcaatggcggtggcaagcaggcgctggagacggtccagcggctgttgccggtgctgtgccaggcccacggcttgaccccggagcaggtggtggccatcgccagcaatattggtggcaagcaggcgctggagacggtgcaggcgctgttgccggtgctgtgccaggcccacggcttgaccccggagcaggtggtggccatcgccagcaatattggtggcaagcaggcgctggagacggtgcaggcgctgttgccggtgctgtgccaggcccacggcttgaccccggagcaggtggtggccatcgccagccacgatggcggcaagcaggcgctggagacggtccagcggctgttgccggtgctgtgccaggcccacggcttgaccccggagcaggtggtggccatcgccagccacgatggcggcaagcaggcgctggagacggtccagcggctgttgccggtgctgtgccaggcccacggcttgaccccggagcaggtggtggccatcgccagccacgatggcggcaagcaggcgctggagacggtccagcggctgttgccggtgctgtgccaggcccacggcttgaccccccagcaggtggtggccatcgccagcaatggcggtggcaagcaggcgctggagacggtccagcggctgttgccggtgctgtgccaggcccacggcttgaccccggagcaggtggtggccatcgccagccacgatggcggcaagcaggcgctggagacggtccagcggctgttgccggtgctgtgccaggcccacggcttgacccctcagcaggtggtggccatcgccagcaatggcggcggcaggccggcgctggagagcattgttgcccagttatctcgccctgatccgggatccaagtctggcatctaccagattaagaacaccctgaataacaaagtgtatgttggatctgccaaggactttgagaaaagatggaagaggcacttcaaggatctggaaaagggttgccacagctccatcaagctccaaaggtctttcaacaaacatggcaatgtctttgagtgctccattttggaagagatcccttatgaaaaggacctcattatagagagggaaaacttctggatcaaggagctgaactcaaaaatcaatggatacaacattgcagatgccacatttggtgacacctgttctactcacccccttaaggaagagatcattaaaaagaggtctgagactgtgaaggctaagatgttgaaactggggcctgatggcagaaaggcactctactctaagccaggtagcaaaaatggaaggtggaaccctgagacccacaagttctgcaaatgtggggtgagaatacagacatcagcctacacttgcagcaagtgtaggaacagatcaggagagaataactcctttttcaaccacaagcattctgacatcaccaagtccaaaatttcaggcaagatgaaaggtcaaggtccatcggccgactgataagtcgaccaccaccaccaccaccactgataagagctcctcgagcctgcagcagctgaagctttggacttctggcgcgcccaattcgccctatagtgagtcgtattacgtcgcgctcactggccgtcgttttacaacgtcgtgactgggaaaaccctggcgttacccaacttaatcgccttgcagcacatccccctttcgccagctggcgtaatagcgaagaggcccgcaccgaaacgcccttcccaacagttgcgcagcctgaatggcgaatgggagcgccctgtagcggcgcattaagcgcggcgggtgtggtggttacgcgcagcgtgaccgctacacttgccagcgccctagcgcccgctcctttcgctttcttcccttcctttctcgccacgttcgccggctttccccgtcaagctctaaatcgggggctccctttagggttccgatttagtgctttacggcacctcgaccccaaaaaacttgattagggtgatggttggcctgtagtgggccatagccctgatagacggtttttcgccctttgacgttggagtccacgttctttaatagtggactcttgttccaaactggaacaacactcaaccctatctcggtctattcttttgatttataagggattttgccgatttcggcctattggttaaaaaatgagctgatttaacaaaaatttaacgcgaattttaacaaaatattaacgcttacaatttaggtggcacttttcggggaaatgtgcgcggaacccctatttgtttatttttctaaatacattcaaatatgtatccgctcatgagacaataaccctgataaatgcttcaataatattgaaaaaggaagagtatgagtattcaacatttccgtgtcgcccttattcccttttttgcggcattttgccttcctgtttttgctcacccagaaacgctggtgaaagtaaaagatgctgaagatcagttgggtgcacgagtgggttacatcgaactggatctcaacagcggtaagatccttgagagttttcgccccgaagaacgttttccaatgatgagcacttttaaagttctgctatgtggcgcggtattatcccgtattgacgccgggcaagagcaactcggtcgccgcatacactattctcagaatgacttggttgagtactcaccagtcacagaaaagcatcttacggatggcatgacagtaagagaattatgcagtgctgccataaccatgagtgataacactgcggccaacttacttctgacaacgatcggaggaccgaaggagctaaccgcttttttgcacaacatgggggatcatgtaactcgccttgatcgttgggaaccggagctgaatgaagccataccaaacgacgagcgtgacaccacgatgcctgtagcaatggcaacaacgttgcgcaaactattaactggcgaactacttactctagcttcccggcaacaattaatagactggatggaggcggataaagttgcaggaccacttctgcgctcggcccttccggctggctggtttattgctgataaatctggagccggtgagcgtggttctcgcggtatcattgcagcactggggccagatggtaagccctcccgtatcgtagttatctacacgacggggagtcaggcaactatggatgaacgaaatagacagatcgctgagataggtgcctcactgattaagcattggtaactgtcagaccaagtttactcatatatactttagattgatttaaaacttcatttttaatttaaaaggatctaggtgaagatcctttttgataatctcatgaccaaaatcccttaacgtgagttttcgttccactgagcgtcagaccccgtagaaaagatcaaaggatcttcttgagatcctttttttctgcgcgtaatctgctgcttgcaaacaaaaaaaccaccgctaccagcggtggtttgtttgccggatcaagagctaccaactctttttccgaaggtaactggcttcagcagagcgcagataccaaatactgttcttctagtgtagccgtagttaggccaccacttcaagaactctgtagcaccgcctacatacctcgctctgctaatcctgttaccagtggctgctgccagtggcgataagtcgtgtcttaccgggttggactcaagacgatagttaccggataaggcgcagcggtcgggctgaacggggggttcgtgcacacagcccagcttggagcgaacgacctacaccgaactgagatacctacagcgtgagctatgagaaagcgccacgcttcccgaagggagaaaggcggacaggtatccggtaagcggcagggtcggaacaggagagcgcacgagggagcttccagggggaaacgcctggtatctttatagtcctgtcgggtttcgccacctctgacttgagcgtcgatttttgtgatgctcgtcaggg

SEQ ID NO: 219 - protein, 6 aa, Artificial sequence
  SGGSGS stretch
SGGSGS

SEQ ID NO: 220 - protein, 1164 aa, Xanthomonas spp.
  Original AvrBs3 TALE
MDPIRSRTPSPARELLPGPQPDGVQPTADRGVSPPAGGPLDGLPARRTMSRTRLPSPPAPSPAFSAGSFSDLLRQFDPSLFNTSLFDSLPPFGAHHTEAATGEWDEVQSGLRAADAPPPTMRVAVTAARPPRAKPAPRRRAAQPSDASPAAQVDLRTLGYSQQQQEKIKPKVRSTVAQHHEALVGHGFTHAHIVALSQHPAALGTVAVKYQDMIAALPEATHEAIVGVGKQWSGARALEALLTVAGELRGPPLQLDTGQLLKIAKRGGVTAVEAVHAWRNALTGAPLNLTPEQVVAIASHDGGKQALETVQRLLPVLCQAHGLTPQQVVAIASNGGGKQALETVQRLLPVLCQAHGLTPQQVVAIASNSGGKQALETVQRLLPVLCQAHGLTPEQVVAIASNGGGKQALETVQRLLPVLCQAHGLTPEQVVAIASNIGGKQALETVQALLPVLCQAHGLTPEQVVAIASNIGGKQALETVQALLPVLCQAHGLTPEQVVAIASNIGGKQALETVQALLPVLCQAHGLTPEQVVAIASHDGGKQALETVQRLLPVLCQAHGLTPEQVVAIASHDGGKQALETVQRLLPVLCQAHGLTPQQVVAIASNGGGKQALETVQRLLPVLCQAHGLTPEQVVAIASNSGGKQALETVQALLPVLCQAHGLTPEQVVAIASNSGGKQALETVQRLLPVLCQAHGLTPEQVVAIASHDGGKQALETVQRLLPVLCQAHGLTPEQVVAIASHDGGKQALETVQRLLPVLCQAHGLTPEQVVAIASHDGGKQALETVQRLLPVLCQAHGLTPQQVVAIASNGGGRPALETVQRLLPVLCQAHGLTPEQVVAIASHDGGKQALETVQRLLPVLCQAHGLTPQQVVAIASNGGGRPALESIVAQLSRPDPALAALTNDHLVALACLGGRPALDAVKKGLPHAPALIKRTNRRIPERTSHRVADHAQVVRVLGFFQCHSHPAQAFDDAMTQFGMSRHGLLQLFRRVGVTELEARSGTLPPASQRWDRILQASGMKRAKPSPTSTQTPDQASLHAFADSLERDLDAPSPMHEGDQTRASSRKRSRSDRAVTGPSAQQSFEVRVPEQRDALHLPLSWRVKRPRTSIGGGLPDPGTPTAADLAASSTVMREQDEDPFAGAADDFPAFNEEELAWLMELLPQ

SEQ ID NO: 221 - protein, 417 aa, Artificial sequence
  pCLS9937
MVDLRTLGYSQQQQEKIKPKVRSTVAQHHEALVGHGFTHAHIVALSQHPAALGTVAVKYQDMIAALPEATHEAIVGVGKQWSGARALEALLTVAGELRGPPLQLDTGQLLKIAKRGGVTAVEAVHAWRNALTGAPLNLTGDARGIRSRASRSIVAQLSRPDPGSQVPPLTELSPSISVHLLLGNPSGATPTKLTPDNYLMVKNQYALSYNNSKGTANWVAWQLNSSWLGNAERQDNFRPDKTLPAGWVRVTPSMYSGSGYDRGHIAPSADRTKTTEDNAATFLMTNMMPQTPDNNRNTWGNLEDYCRELVSQGKELYIVAGPNGSLGKPLKGKVTVPKSTWKIVVVLDSPGSGLEGITANTRVIAVNIPNDPELNNDWRAYKVSVDELESLTGYDFLSNVSPNIQTSIESKVDNAAD

SEQ ID NO: 222 - protein, 1001 aa, Artificial sequence
  pCLS9938
MVDLRTLGYSQQQQEKIKPKVRSTVAQHHEALVGHGFTHAHIVALSQHPAALGTVAVKYQDMIAALPEATHEAIVGVGKQWSGARALEALLTVAGELRGPPLQLDTGQLLKIAKRGGVTAVEAVHAWRNALTGAPLNLTPEQVVAIASHDGGKQALETVQRLLPVLCQAHGLTPQQVVAIASNGGGKQALETVQRLLPVLCQAHGLTPEQVVAIASNIGGKQALETVQALLPVLCQAHGLTPQQVVAIASNGGGKQALETVQRLLPVLCQAHGLTPEQVVAIASNIGGKQALETVQALLPVLCQAHGLTPEQVVAIASNIGGKQALETVQALLPVLCQAHGLTPEQVVAIASNIGGKQALETVQALLPVLCQAHGLTPEQVVAIASHDGGKQALETVQRLLPVLCQAHGLTPEQVVAIASHDGGKQALETVQRLLPVLCQAHGLTPQQVVAIASNGGGKQALETVQRLLPVLCQAHGLTPEQVVAIASNIGGKQALETVQALLPVLCQAHGLTPEQVVAIASNIGGKQALETVQALLPVLCQAHGLTPEQVVAIASHDGGKQALETVQRLLPVLCQAHGLTPEQVVAIASHDGGKQALETVQRLLPVLCQAHGLTPEQVVAIASHDGGKQALETVQRLLPVLCQAHGLTPQQVVAIASNGGGKQALETVQRLLPVLCQAHGLTPEQVVAIASHDGGKQALETVQRLLPVLCQAHGLTPQQVVAIASNGGGRPALESIVAQLSRPDPGSQVPPLTELSPSISVHLLLGNPSGATPTKLTPDNYLMVKNQYALSYNNSKGTANWVAWQLNSSWLGNAERQDNFRPDKTLPAGWVRVTPSMYSGSGYDRGHIAPSADRTKTTEDNAATFLMTNMMPQTPDNNRNTWGNLEDYCRELVSQGKELYIVAGPNGSLGKPLKGKVTVPKSTWKIVVVLDSPGSGLEGITANTRVIAVNIPNDPELNNDWRAYKVSVDELESLTGYDFLSNVSPNIQTSIESKVDNAAD

SEQ ID NO: 223 - DNA, 11304 bp, Artificial sequence
  pCLS9924
ttccataggctccgcccccctgacgagcatcacaaaaatcgacgctcaagtcagaggtggcgaaacccgacaggactataaagataccaggcgtttccccctggaagctccctcgtgcgctctcctgttccgaccctgccgcttaccggatacctgtccgcctttctcccttcgggaagcgtggcgctttctcatagctcacgctgtaggtatctcagttcggtgtaggtcgttcgctccaagctgggctgtgtgcacgaaccccccgttcagcccgaccgctgcgccttatccggtaactatcgtcttgagtccaacccggtaagacacgacttatcgccactggcagcagccactggtaacaggattagcagagcgaggtatgtaggcggtgctacagagttcttgaagtggtggcctaactacggctacactagaaggacagtatttggtatctgcgctctgctgaagccagttaccttcggaaaaagagttggtagctcttgatccggcaaacaaaccaccgctggtagcggtggtttttttgtttgcaagcagcagattacgcgcagaaaaaaaggatctcaagaagatcctttgatcttttctacggggtctgacgctcagtggaacgaaaactcacgttaagggattttggtcatgagattatcaaaaaggatcttcacctagatccttttaaattaaaaatgaagttttaaatcaatctaaagtatatatgagtaaacttggtctgacagttaccaatgcttaatcagtgaggcacctatctcagcgatctgtctatttcgttcatccatagttgcctgactccccgtcgtgtagataactacgatacgggagggcttaccatctggccccagtgctgcaatgataccgcgagacccacgctcaccggctccagatttatcagcaataaaccagccagccggaagggccgagcgcagaagtggtcctgcaactttatccgcctccatccagtctattaattgttgccgggaagctagagtaagtagttcgccagttaatagtttgcgcaacgttgttgccattgctacaggcatcgtggtgtcacgctcgtcgtttggtatggcttcattcagctccggttcccaacgatcaaggcgagttacatgatcccccatgttgtgcaaaaaagcggttagctccttcggtcctccgatcgttgtcagaagtaagttggccgcagtgttatcactcatggttatggcagcactgcataattctcttactgtcatgccatccgtaagatgcttttctgtgactggtgagtactcaaccaagtcattctgagaatagtgtatgcggcgaccgagttgctcttgcccggcgtcaatacgggataataccgcgccacatagcagaactttaaaagtgctcatcattggaaaacgttcttcggggcgaaaactctcaaggatcttaccgctgttgagatccagttcgatgtaacccactcgtgcacccaactgatcttcagcatcttttactttcaccagcgtttctgggtgagcaaaaacaggaaggcaaaatgccgcaaaaaagggaataagggcgacacggaaatgttgaatactcatactcttcctttttcaatattattgaagcatttatcagggttattgtctcatgagcggatacatatttgaatgtatttagaaaaataaacaaataggggttccgcgcacatttccccgaaaagtgccacctgacgtccgatcaaaaatcatcgcttcgctgattaattaccccagaaataaggctaaaaaactaatcgcattatcatcctatggttgttaatttgattcgttcatttgaaggtttgtggggccaggttactgccaatttttcctcttcataaccataaaagctagtattgtagaatctttattgttcggagcagtgcggcgcgaggcacatctgcgtttcaggaacgcgaccggtgaagacgaggacgcacggaggagagtcttccttcggagggctgtcacccgctcggcggcttctaatccgtacttcaatatagcaatgagcagttaagcgtattactgaaagttccaaagagaaggtttttttaggctaatcgacctcgagcagatccgccaggcgtgtatatagcgtggatggccaggcaactttagtgctgacacatacaggcatatatatatgtgtgcgacgacacatgatcatatggcatgcatgtgctctgtatgtatataaaactcttgttttcttcttttctctaaatattctttccttatacattaggtcctttgtagcataaattactatacttctatagacacgcaaacacaaatacacagcggccttgccaccatggtggatctacgcacgctcggctacagccagcagcaacaggagaagatcaaaccgaaggttcgttcgacagtggcgcagcaccacgaggcactggtcggccacgggtttacacacgcgcacatcgttgcgttaagccaacacccggcagcgttagggaccgtcgctgtcaagtatcaggacatgatcgcagcgttgccagaggcgacacacgaagcgatcgttggcgtcggcaaacagtggtccggcgcacgcgctctggaggccttgctcacggtggcgggagagttgagaggtccaccgttacagttggacacaggccaacttctcaagattgcaaaacgtggcggcgtgaccgcagtggaggcagtgcatgcatggcgcaatgcactgacgggtgccccgctcaacttgaccccggagcaggtggtggccatcgccagccacgatggcggcaagcaggcgctggagacggtccagcggctgttgccggtgctgtgccaggcccacggcttgaccccccagcaggtggtggccatcgccagcaatggcggtggcaagcaggcgctggagacggtccagcggctgttgccggtgctgtgccaggcccacggcttgaccccggagcaggtggtggccatcgccagcaatattggtggcaagcaggcgctggagacggtgcaggcgctgttgccggtgctgtgccaggcccacggcttgaccccccagcaggtggtggccatcgccagcaatggcggtggcaagcaggcgctggagacggtccagcggctgttgccggtgctgtgccaggcccacggcttgaccccggagcaggtggtggccatcgccagcaatattggtggcaagcaggcgctggagacggtgcaggcgctgttgccggtgctgtgccaggcccacggcttgaccccggagcaggtggtggccatcgccagcaatattggtggcaagcaggcgctggagacggtgcaggcgctgttgccggtgctgtgccaggcccacggcttgaccccggagcaggtggtggccatcgccagcaatattggtggcaagcaggcgctggagacggtgcaggcgctgttgccggtgctgtgccaggcccacggcttgaccccggagcaggtggtggccatcgccagccacgatggcggcaagcaggcgctggagacggtccagcggctgttgccggtgctgtgccaggcccacggcttgaccccggagcaggtggtggccatcgccagccacgatggcggcaagcaggcgctggagacggtccagcggctgttgccggtgctgtgccaggcccacggcttgaccccccagcaggtggtggccatcgccagcaatggcggtggcaagcaggcgctggagacggtccagcggctgttgccggtgctgtgccaggcccacggcttgaccccggagcaggtggtggccatcgccagcaatattggtggcaagcaggcgctggagacggtgcaggcgctgttgccggtgctgtgccaggcccacggcttgaccccggagcaggtggtggccatcgccagcaatattggtggcaagcaggcgctggagacggtgcaggcgctgttgccggtgctgtgccaggcccacggcttgaccccggagcaggtggtggccatcgccagccacgatggcggcaagcaggcgctggagacggtccagcggctgttgccggtgctgtgccaggcccacggcttgaccccggagcaggtggtggccatcgccagccacgatggcggcaagcaggcgctggagacggtccagcggctgttgccggtgctgtgccaggcccacggcttgaccccggagcaggtggtggccatcgccagccacgatggcggcaagcaggcgctggagacggtccagcggctgttgccggtgctgtgccaggcccacggcttgaccccccagcaggtggtggccatcgccagcaatggcggtggcaagcaggcgctggagacggtccagcggctgttgccggtgctgtgccaggcccacggcttgaccccggagcaggtggtggccatcgccagccacgatggcggcaagcaggcgctggagacggtccagcggctgttgccggtgctgtgccaggcccacggcttgacccctcagcaggtggtggccatcgccagcaatggcggcggcaggccggcgctggagagcattgttgcccagttatctcgccctgatccgggatcccaagtcccaccattgacagagttaagtccgtctatttcggtacacttactgcttgggaatccttctggtgcaacacccacaaagctaactccagacaattacctgatggtgaagaaccagtatgccttgtcctacaataactccaagggtactgccaattgggttgcttggcaattgaactcctcttggcttggtaatgcggaaagacaggacaatttcagacctgacaaaaccttacctgcaggatgggtaagagttactccatcaatgtattccggatctggttatgatagaggtcatatagctcctagtgctgataggacgaaaactactgaggataatgccgctacctttctgatgacgaacatgatgcctcaaactccagataataaccgtaatacctggggaaacttggaagattactgtagggaattagtctcacaaggtaaagaattgtacattgttgcaggacctaatggctcattaggcaaacccttgaaagggaaagtcactgtgccaaagagtacatggaagattgtggttgttcttgattcaccaggtagtggtttggaaggtataacggcaaacacaagagtgattgctgtcaatatcccaaacgatccggagttgaacaacgattggagagcgtataaggtatcagttgacgaactagaatctttaacaggctatgactttctaagcaatgtatctcccaatatccaaaccagcatagaatcgaaagttgataatgcggccgactgataactcgagcgatcctctagacgagctcctcgagcctgcagcagctgaagctttggacttcttcgccagaggtttggtcaagtctccaatcaaggttgtcggcttgtctaccttgccagaaatttacgaaaagatggaaaagggtcaaatcgttggtagatacgttgttgacacttctaaataagcgaatttcttatgatttatgatttttattattaaataagttataaaaaaaataagtgtatacaaattttaaagtgactcttaggttttaaaacgaaaattcttattcttgagtaactctttcctgtaggtcaggttgctttctcaggtatagcatgaggtcgctcttattgaccacacctctaccggcatgcaagcttggcgtaatcatggtcatagctgtttcctgtgtgaaattgttatccgctcacaattccacacaacatacgagccggaagcataaagtgtaaagcctggggtgcctaatgagtgagctaactcacattaattgcgttgcgctcactgcccgctttccagtcgggaaacctgtcgtgccagcagatctattacattatgggtggtatgttggaataaaaatcaactatcatctactaactagtatttacgttactagtatattatcatatacggtgttagaagatgacgcaaatgatgagaaatagtcatctaaattagtggaagctgaaacgcaaggattgataatgtaataggatcaatgaatattaacatataaaatgatgataataatatttatagaattgtgtagaattgcagattcccttttatggattcctaaatcctcgaggagaacttctagtatatctacatacctaatattattgccttattaaaaatggaatcccaacaattacatcaaaatccacattctcttcaaaatcaattgtcctgtacttccttgttcatgtgtgttcaaaaacgttatatttataggataattatactctatttctcaacaagtaattggttgtttggccgagcggtctaaggcgcctgattcaagaaatatcttgaccgcagttaactgtgggaatactcaggtatcgtaagatgcaagagttcgaatctcttagcaaccattatttttttcctcaacataacgagaacacacaggggcgctatcgcacagaatcaaattcgatgactggaaattttttgttaatttcagaggtcgcctgacgcatatacctttttcaactgaaaaattgggagaaaaaggaaaggtgagagccgcggaaccggcttttcatatagaatagagaagcgttcatgactaaatgcttgcatcacaatacttgaagttgacaatattatttaaggacctattgttttttccaataggtggttagcaatcgtcttactttctaacttttcttaccttttacatttcagcaatatatatatatatatttcaaggatataccattctaatgtctgcccctaagaagatcgtcgttttgccaggtgaccacgttggtcaagaaatcacagccgaagccattaaggttcttaaagctatttctgatgttcgttccaatgtcaagttcgatttcgaaaatcatttaattggtggtgctgctatcgatgctacaggtgtcccacttccagatgaggcgctggaagcctccaagaaggttgatgccgttttgttaggtgctgtgggtggtcctaaatggggtaccggtagtgttagacctgaacaaggtttactaaaaatccgtaaagaacttcaattgtacgccaacttaagaccatgtaactttgcatccgactctcttttagacttatctccaatcaagccacaatttgctaaaggtactgacttcgttgttgtcagagaattagtgggaggtatttactttggtaagagaaaggaagacgatggtgatggtgtcgcttgggatagtgaacaatacaccgttccagaagtgcaaagaatcacaagaatggccgctttcatggccctacaacatgagccaccattgcctatttggtccttggataaagctaatgttttggcctcttcaagattatggagaaaaactgtggaggaaaccatcaagaacgaattccctacattgaaggttcaacatcaattgattgattctgccgccatgatcctagttaagaacccaacccacctaaatggtattataatcaccagcaacatgtttggtgatatcatctccgatgaagcctccgttatcccaggttccttgggtttgttgccatctgcgtccttggcctctttgccagacaagaacaccgcatttggtttgtacgaaccatgccacggttctgctccagatttgccaaagaataaggtcaaccctatcgccactatcttgtctgctgcaatgatgttgaaattgtcattgaacttgcctgaagaaggtaaggccattgaagatgcagttaaaaaggttttggatgcaggtatcagaactggtgatttaggtggttccaacagtaccacggaagtcggtgatgctgtcgccgaagaagttaagaaaatccttgcttaaaaagattctctttttttatgatatttgtacataaactttataaatgaaattcataatagaaacgacacgaaattacaaaatggaatatgttcatagggtagacgaaactatatacgcaatctacatacatttatcaagaaggagaaaaaggaggatgtaaaggaatacaggtaagcaaattgatactaatggctcaacgtgataaggaaaaagaattgcactttaacattaatattgacaaggaggagggcaccacacaaaaagttaggtgtaacagaaaatcatgaaactatgattcctaatttatatattggaggattttctctaaaaaaaaaaaaatacaacaaataaaaaacactcaatgacctgaccatttgatggagtttaagtcaataccttcttgaaccatttcccataatggtgaaagttccctcaagaattttactctgtcagaaacggccttaacgacgtagtcgacctcctcttcagtactaaatctaccaataccaaatctgatggaagaatgggctaatgcatcatccttacccagcgcatgtaaaacataagaaggttctagggaagcagatgtacaggctgaacccgaggataatgcgatatcccttagtgccatcaataaagattctccttccacgtaggcgaaagaaacgttaacacaccctggataacgatgatctggagatccgttcaacgtggtatgttcagcggataatagacctttgactaatttatcggatagtcttttgatgtgagcttggtcgttgtcaaattctttcttcatcaatctcgcagcttcaccaaatcccgctaccaatgggggggccaaagtaccagatctgctgcattaatgaatcggccaacgcgcggggagaggcggtttgcgtattgggcgctcttccgcttcctcgctcactgactcgctgcgctcggtcgttcggctgcggcgagcggtatcagcatcgatgaattccacggactatagactatactagtatactccgtctactgtacgatacacttccgctcaggtccttgtcctttaacgaggccttaccactcttttgttactctattgatccagctcagcaaaggcagtgtgatctaagattctatcttcgcgatgtagtaaaactagctagaccgagaaagagactagaaatgcaaaaggcacttctacaatggctgccatcattattatccgatgtgacgctgcagcttctcaatgatattcgaatacgctttgaggagatacagcctaatatccgacaaactgttttacagatttacgatcgtacttgttacccatcattgaattttgaacatccgaacctgggagttttccctgaaacagatagtatatttgaacctgtataataatatatagtctagcgctttacggaagacaatgtatgtatttcggttcctggagaaactattgcatctattgcataggtaatcttgcacgtcgcatccccggttcattttctgcgtttccatcttgcacttcaatagcatatctttgttaacgaagcatctgtgcttcattttgtagaacaaaaatgcaacgcgagagcgctaatttttcaaacaaagaatctgagctgcatttttacagaacagaaatgcaacgcgaaagcgctattttaccaacgaagaatctgtgcttcatttttgtaaaacaaaaatgcaacgcgagagcgctaatttttcaaacaaagaatctgagctgcatttttacagaacagaaatgcaacgcgagagcgctattttaccaacaaagaatctatacttcttttttgttctacaaaaatgcatcccgagagcgctatttttctaacaaagcatcttagattactttttttctcctttgtgcgctctataatgcagtctcttgataactttttgcactgtaggtccgttaaggttagaagaaggctactttggtgtctattttctcttccataaaaaaagcctgactccacttcccgcgtttactgattactagcgaagctgcgggtgcattttttcaagataaaggcatccccgattatattctataccgatgtggattgcgcatactttgtgaacagaaagtgatagcgttgatgattcttcattggtcagaaaattatgaacggtttcttctattttgtctctatatactacgtataggaaatgtttacattttcgtattgttttcgattcactctatgaatagttcttactacaatttttttgtctaaagagtaatactagagataaacataaaaaatgtagaggtcgagtttagatgcaagttcaaggagcgaaaggtggatgggtaggttatatagggatatagcacagagatatatagcaaagagatacttttgagcaatgtttgtggaagcggtattcgcaatattttagtagctcgttacagtccggtgcgtttttggttttttgaaagtgcgtcttcagagcgcttttggttttcaaaagcgctctgaagttcctatactttctagagaataggaacttcggaataggaacttcaaagcgtttccgaaaacgagcgcttccgaaaatgcaacgcgagctgcgcacatacagctcactgttcacgtcgcacctatatctgcgtgttgcctgtatatatatatacatgagaagaacggcatagtgcgtgtttatgcttaaatgcgtacttatatgcgtctatttatgtaggatgaaaggtagtctagtacctcctgtgatattatcccattccatgcggggtatcgtatgcttccttcagcactaccctttagctgttctatatgctgccactcctcaattggattagtctcatccttcaatgctatcatttcctttgatattggatcatatgcatagtaccgagaaactagtgcgaagtagtgatcaggtattgctgttatctgatgagtatacgttgtcctggccacggcagaagcacgcttatcgctccaatttcccacaacattagtcaactccgttaggcccttcattgaaagaaatgaggtcatcaaatgtcttccaatgtgagattttgggccattttttatagcaaagattgaataaggcgcatttttcttcaaagctttattgtacgatctgactaagttatcttttaataattggtattcctgtttattgcttgaagaattgccggtcctatttactcgttttaggactggttcagaattcatcgatgctcactcaaaggtcggtaatacggttatccacagaatcaggggataacgcaggaaagaacatgtgagcaaaaggccagcaaaaggccaggaaccgtaaaaaggccgcgttgctggcgttt

SEQ ID NO: 224 - DNA, 65 bp, Artificial sequence
  compact target
tatataaacctaaccctcttagcatgaaggtaccttgtcgatggtgtacagtagggggagatgca

SEQ ID NO: 225 - protein, 1166 aa, Artificial sequence
  pCLS9596
MADPIRSRTPSPARELLPGPQPDGVQPTADRGVSPPAGGPLDGLPARRTMSRTRLPSPPAPSPAFSAGSFSDLLRQFDPSLFNTSLFDSLPPFGAHHTEAATGEWDEVQSGLRAADAPPPTMRVAVTAARPPRAKPAPRRRAAQPSDASPAAQVDLRTLGYSQQQQEKIKPKVRSTVAQHHEALVGHGFTHAHIVALSQHPAALGTVAVKYQDMIAALPEATHEAIVGVGKQWSGARALEALLTVAGELRGPPLQLDTGQLLKIAKRGGVTAVEAVHAWRNALTGAPLNLTPEQVVAIASHDGGKQALETVQRLLPVLCQAHGLTPQQVVAIASNGGGKQALETVQRLLPVLCQAHGLTPEQVVAIASNIGGKQALETVQALLPVLCQAHGLTPQQVVAIASNGGGKQALETVQRLLPVLCQAHGLTPEQVVAIASNIGGKQALETVQALLPVLCQAHGLTPEQVVAIASNIGGKQALETVQALLPVLCQAHGLTPEQVVAIASNIGGKQALETVQALLPVLCQAHGLTPEQVVAIASHDGGKQALETVQRLLPVLCQAHGLTPEQVVAIASHDGGKQALETVQRLLPVLCQAHGLTPQQVVAIASNGGGKQALETVQRLLPVLCQAHGLTPEQVVAIASNIGGKQALETVQALLPVLCQAHGLTPEQVVAIASNIGGKQALETVQALLPVLCQAHGLTPEQVVAIASHDGGKQALETVQRLLPVLCQAHGLTPEQVVAIASHDGGKQALETVQRLLPVLCQAHGLTPEQVVAIASHDGGKQALETVQRLLPVLCQAHGLTPQQVVAIASNGGGKQALETVQRLLPVLCQAHGLTPEQVVAIASHDGGKQALETVQRLLPVLCQAHGLTPQQVVAIASNGGGRPALESIVAQLSRPDPSGSGSGGDPSGGSGSQVPPLTELSPSISVHLLLGNPSGATPTKLTPDNYLMVKNQYALSYNNSKGTANWVAWQLNSSWLGNAERQDNFRPDKTLPAGWVRVTPSMYSGSGYDRGHIAPSADRTKTTEDNAATFLMTNMMPQTPDNNRNTWGNLEDYCRELVSQGKELYIVAGPNGSLGKPLKGKVTVPKSTWKIVVVLDSPGSGLEGITANTRVIAVNIPNDPELNNDWRAYKVSVDELESLTGYDFLSNVSPNIQTSIESKVDNAAD

SEQ ID NO: 226 - protein, 1177 aa, Artificial sequence
  pCLS9597
MADPIRSRTPSPARELLPGPQPDGVQPTADRGVSPPAGGPLDGLPARRTMSRTRLPSPPAPSPAFSAGSFSDLLRQFDPSLFNTSLFDSLPPFGAHHTEAATGEWDEVQSGLRAADAPPPTMRVAVTAARPPRAKPAPRRRAAQPSDASPAAQVDLRTLGYSQQQQEKIKPKVRSTVAQHHEALVGHGFTHAHIVALSQHPAALGTVAVKYQDMIAALPEATHEAIVGVGKQWSGARALEALLTVAGELRGPPLQLDTGQLLKIAKRGGVTAVEAVHAWRNALTGAPLNLTPEQVVAIASHDGGKQALETVQRLLPVLCQAHGLTPQQVVAIASNGGGKQALETVQRLLPVLCQAHGLTPEQVVAIASNIGGKQALETVQALLPVLCQAHGLTPQQVVAIASNGGGKQALETVQRLLPVLCQAHGLTPEQVVAIASNIGGKQALETVQALLPVLCQAHGLTPEQVVAIASNIGGKQALETVQALLPVLCQAHGLTPEQVVAIASNIGGKQALETVQALLPVLCQAHGLTPEQVVAIASHDGGKQALETVQRLLPVLCQAHGLTPEQVVAIASHDGGKQALETVQRLLPVLCQAHGLTPQQVVAIASNGGGKQALETVQRLLPVLCQAHGLTPEQVVAIASNIGGKQALETVQALLPVLCQAHGLTPEQVVAIASNIGGKQALETVQALLPVLCQAHGLTPEQVVAIASHDGGKQALETVQRLLPVLCQAHGLTPEQVVAIASHDGGKQALETVQRLLPVLCQAHGLTPEQVVAIASHDGGKQALETVQRLLPVLCQAHGLTPQQVVAIASNGGGKQALETVQRLLPVLCQAHGLTPEQVVAIASHDGGKQALETVQRLLPVLCQAHGLTPQQVVAIASNGGGRPALESIVAQLSRPDPALAALTNDHLVALACLGGDPSGGSGSQVPPLTELSPSISVHLLLGNPSGATPTKLTPDNYLMVKNQYALSYNNSKGTANWVAWQLNSSWLGNAERQDNFRPDKTLPAGWVRVTPSMYSGSGYDRGHIAPSADRTKTTEDNAATFLMTNMMPQTPDNNRNTWGNLEDYCRELVSQGKELYIVAGPNGSLGKPLKGKVTVPKSTWKIVVVLDSPGSGLEGITANTRVIAVNIPNDPELNNDWRAYKVSVDELESLTGYDFLSNVSPNIQTSIESKVDNAAD

SEQ ID NO: 227 - protein, 1213 aa, Artificial sequence
  pCLS9599
MADPIRSRTPSPARELLPGPQPDGVQPTADRGVSPPAGGPLDGLPARRTMSRTRLPSPPAPSPAFSAGSFSDLLRQFDPSLFNTSLFDSLPPFGAHHTEAATGEWDEVQSGLRAADAPPPTMRVAVTAARPPRAKPAPRRRAAQPSDASPAAQVDLRTLGYSQQQQEKIKPKVRSTVAQHHEALVGHGFTHAHIVALSQHPAALGTVAVKYQDMIAALPEATHEAIVGVGKQWSGARALEALLTVAGELRGPPLQLDTGQLLKIAKRGGVTAVEAVHAWRNALTGAPLNLTPEQVVAIASHDGGKQALETVQRLLPVLCQAHGLTPQQVVAIASNGGGKQALETVQRLLPVLCQAHGLTPEQVVAIASNIGGKQALETVQALLPVLCQAHGLTPQQVVAIASNGGGKQALETVQRLLPVLCQAHGLTPEQVVAIASNIGGKQALETVQALLPVLCQAHGLTPEQVVAIASNIGGKQALETVQALLPVLCQAHGLTPEQVVAIASNIGGKQALETVQALLPVLCQAHGLTPEQVVAIASHDGGKQALETVQRLLPVLCQAHGLTPEQVVAIASHDGGKQALETVQRLLPVLCQAHGLTPQQVVAIASNGGGKQALETVQRLLPVLCQAHGLTPEQVVAIASNIGGKQALETVQALLPVLCQAHGLTPEQVVAIASNIGGKQALETVQALLPVLCQAHGLTPEQVVAIASHDGGKQALETVQRLLPVLCQAHGLTPEQVVAIASHDGGKQALETVQRLLPVLCQAHGLTPEQVVAIASHDGGKQALETVQRLLPVLCQAHGLTPQQVVAIASNGGGKQALETVQRLLPVLCQAHGLTPEQVVAIASHDGGKQALETVQRLLPVLCQAHGLTPQQVVAIASNGGGRPALESIVAQLSRPDPALAALTNDHLVALACLGGRPALDAVKKGLPHAPALIKRTNRRIPERTSHRVADGDPSGGSGSQVPPLTELSPSISVHLLLGNPSGATPTKLTPDNYLMVKNQYALSYNNSKGTANWVAWQLNSSWLGNAERQDNFRPDKTLPAGWVRVTPSMYSGSGYDRGHIAPSADRTKTTEDNAATFLMTNMMPQTPDNNRNTWGNLEDYCRELVSQGKELYIVAGPNGSLGKPLKGKVTVPKSTWKIVVVLDSPGSGLEGITANTRVIAVNIPNDPELNNDWRAYKVSVDELESLTGYDFLSNVSPNIQTSIESKVDNAAD

SEQ ID NO: 228 - DNA, 24 bp, Artificial sequence
  negative control target
ttgttctcaggtacctcagccaga

SEQ ID NO: 229 - protein, 135 aa, Artificial sequence
  NuiA protein
MTKTNSEILEQLKQASDGLLFMSESEYPFEVFLWEGSAPPVTHEIVLQQTGHGQDAPFKVVDIDSFFSRATTPQDWYEDEENAVVAKFQKLLEVIKSNLKNPQVYRLGEVELDVYVIGETPAGNLAGISTKVVET

SEQ ID NO: 230 - protein, 87 aa, Artificial sequence
  Im7 protein
MELKNSISDYTEAEFVQLLKEIEKENVAATDDVLDVLLEHFVKITEHPDGTDLIYYPSDNRDDSPEGIVKEIKEWRAANGKPGFKQG

SEQ ID NO: 231 - protein, 303 aa, Artificial sequence
  pCLS9939
MVDLRTLGYSQQQQEKIKPKVRSTVAQHHEALVGHGFTHAHIVALSQHPAALGTVAVKYQDMIAALPEATHEAIVGVGKQWSGARALEALLTVAGELRGPPLQLDTGQLLKIAKRGGVTAVEAVHAWRNALTGAPLNLTGDARGIRSRASRSIVAQLSRPDPGSSGSKRNKPGKATGKGKPVNNKWLNNAGKDLGSPVPDRIANKLRDKEFKSFDDFRKKFWEEVSKDPELSKQFSRNNNDRMKVGKAPKTRTQDVSGKRTSFELHHEKPISQNGGVYDMDNISVVTPKRHIDIHRGKGSSAD

SEQ ID NO: 232 - protein, 887 aa, Artificial sequence
  pCLS9940
MVDLRTLGYSQQQQEKIKPKVRSTVAQHHEALVGHGFTHAHIVALSQHPAALGTVAVKYQDMIAALPEATHEAIVGVGKQWSGARALEALLTVAGELRGPPLQLDTGQLLKIAKRGGVTAVEAVHAWRNALTGAPLNLTPEQVVAIASHDGGKQALETVQRLLPVLCQAHGLTPQQVVAIASNGGGKQALETVQRLLPVLCQAHGLTPEQVVAIASNIGGKQALETVQALLPVLCQAHGLTPQQVVAIASNGGGKQALETVQRLLPVLCQAHGLTPEQVVAIASNIGGKQALETVQALLPVLCQAHGLTPEQVVAIASNIGGKQALETVQALLPVLCQAHGLTPEQVVAIASNIGGKQALETVQALLPVLCQAHGLTPEQVVAIASHDGGKQALETVQRLLPVLCQAHGLTPEQVVAIASHDGGKQALETVQRLLPVLCQAHGLTPQQVVAIASNGGGKQALETVQRLLPVLCQAHGLTPEQVVAIASNIGGKQALETVQALLPVLCQAHGLTPEQVVAIASNIGGKQALETVQALLPVLCQAHGLTPEQVVAIASHDGGKQALETVQRLLPVLCQAHGLTPEQVVAIASHDGGKQALETVQRLLPVLCQAHGLTPEQVVAIASHDGGKQALETVQRLLPVLCQAHGLTPQQVVAIASNGGGKQALETVQRLLPVLCQAHGLTPEQVVAIASHDGGKQALETVQRLLPVLCQAHGLTPQQVVAIASNGGGRPALESIVAQLSRPDPGSSGSKRNKPGKATGKGKPVNNKWLNNAGKDLGSPVPDRIANKLRDKEFKSFDDFRKKFWEEVSKDPELSKQFSRNNNDRMKVGKAPKTRTQDVSGKRTSFELHHEKPISQNGGVYDMDNISVVTPKRHIDIHRGKGSSAD

SEQ ID NO: 233 - DNA, 10962 bp, Artificial sequence
  pCLS8589
ttccataggctccgcccccctgacgagcatcacaaaaatcgacgctcaagtcagaggtggcgaaacccgacaggactataaagataccaggcgtttccccctggaagctccctcgtgcgctctcctgttccgaccctgccgcttaccggatacctgtccgcctttctcccttcgggaagcgtggcgctttctcatagctcacgctgtaggtatctcagttcggtgtaggtcgttcgctccaagctgggctgtgtgcacgaaccccccgttcagcccgaccgctgcgccttatccggtaactatcgtcttgagtccaacccggtaagacacgacttatcgccactggcagcagccactggtaacaggattagcagagcgaggtatgtaggcggtgctacagagttcttgaagtggtggcctaactacggctacactagaaggacagtatttggtatctgcgctctgctgaagccagttaccttcggaaaaagagttggtagctcttgatccggcaaacaaaccaccgctggtagcggtggtttttttgtttgcaagcagcagattacgcgcagaaaaaaaggatctcaagaagatcctttgatcttttctacggggtctgacgctcagtggaacgaaaactcacgttaagggattttggtcatgagattatcaaaaaggatcttcacctagatccttttaaattaaaaatgaagttttaaatcaatctaaagtatatatgagtaaacttggtctgacagttaccaatgcttaatcagtgaggcacctatctcagcgatctgtctatttcgttcatccatagttgcctgactccccgtcgtgtagataactacgatacgggagggcttaccatctggccccagtgctgcaatgataccgcgagacccacgctcaccggctccagatttatcagcaataaaccagccagccggaagggccgagcgcagaagtggtcctgcaactttatccgcctccatccagtctattaattgttgccgggaagctagagtaagtagttcgccagttaatagtttgcgcaacgttgttgccattgctacaggcatcgtggtgtcacgctcgtcgtttggtatggcttcattcagctccggttcccaacgatcaaggcgagttacatgatcccccatgttgtgcaaaaaagcggttagctccttcggtcctccgatcgttgtcagaagtaagttggccgcagtgttatcactcatggttatggcagcactgcataattctcttactgtcatgccatccgtaagatgcttttctgtgactggtgagtactcaaccaagtcattctgagaatagtgtatgcggcgaccgagttgctcttgcccggcgtcaatacgggataataccgcgccacatagcagaactttaaaagtgctcatcattggaaaacgttcttcggggcgaaaactctcaaggatcttaccgctgttgagatccagttcgatgtaacccactcgtgcacccaactgatcttcagcatcttttactttcaccagcgtttctgggtgagcaaaaacaggaaggcaaaatgccgcaaaaaagggaataagggcgacacggaaatgttgaatactcatactcttcctttttcaatattattgaagcatttatcagggttattgtctcatgagcggatacatatttgaatgtatttagaaaaataaacaaataggggttccgcgcacatttccccgaaaagtgccacctgacgtccgatcaaaaatcatcgcttcgctgattaattaccccagaaataaggctaaaaaactaatcgcattatcatcctatggttgttaatttgattcgttcatttgaaggtttgtggggccaggttactgccaatttttcctcttcataaccataaaagctagtattgtagaatctttattgttcggagcagtgcggcgcgaggcacatctgcgtttcaggaacgcgaccggtgaagacgaggacgcacggaggagagtcttccttcggagggctgtcacccgctcggcggcttctaatccgtacttcaatatagcaatgagcagttaagcgtattactgaaagttccaaagagaaggtttttttaggctaatcgacctcgagcagatccgccaggcgtgtatatagcgtggatggccaggcaactttagtgctgacacatacaggcatatatatatgtgtgcgacgacacatgatcatatggcatgcatgtgctctgtatgtatataaaactcttgttttcttcttttctctaaatattctttccttatacattaggtcctttgtagcataaattactatacttctatagacacgcaaacacaaatacacagcggccttgccaccatggtggatctacgcacgctcggctacagccagcagcaacaggagaagatcaaaccgaaggttcgttcgacagtggcgcagcaccacgaggcactggtcggccacgggtttacacacgcgcacatcgttgcgttaagccaacacccggcagcgttagggaccgtcgctgtcaagtatcaggacatgatcgcagcgttgccagaggcgacacacgaagcgatcgttggcgtcggcaaacagtggtccggcgcacgcgctctggaggccttgctcacggtggcgggagagttgagaggtccaccgttacagttggacacaggccaacttctcaagattgcaaaacgtggcggcgtgaccgcagtggaggcagtgcatgcatggcgcaatgcactgacgggtgccccgctcaacttgaccccggagcaggtggtggccatcgccagccacgatggcggcaagcaggcgctggagacggtccagcggctgttgccggtgctgtgccaggcccacggcttgaccccccagcaggtggtggccatcgccagcaatggcggtggcaagcaggcgctggagacggtccagcggctgttgccggtgctgtgccaggcccacggcttgaccccggagcaggtggtggccatcgccagcaatattggtggcaagcaggcgctggagacggtgcaggcgctgttgccggtgctgtgccaggcccacggcttgaccccccagcaggtggtggccatcgccagcaatggcggtggcaagcaggcgctggagacggtccagcggctgttgccggtgctgtgccaggcccacggcttgaccccggagcaggtggtggccatcgccagcaatattggtggcaagcaggcgctggagacggtgcaggcgctgttgccggtgctgtgccaggcccacggcttgaccccggagcaggtggtggccatcgccagcaatattggtggcaagcaggcgctggagacggtgcaggcgctgttgccggtgctgtgccaggcccacggcttgaccccggagcaggtggtggccatcgccagcaatattggtggcaagcaggcgctggagacggtgcaggcgctgttgccggtgctgtgccaggcccacggcttgaccccggagcaggtggtggccatcgccagccacgatggcggcaagcaggcgctggagacggtccagcggctgttgccggtgctgtgccaggcccacggcttgaccccggagcaggtggtggccatcgccagccacgatggcggcaagcaggcgctggagacggtccagcggctgttgccggtgctgtgccaggcccacggcttgaccccccagcaggtggtggccatcgccagcaatggcggtggcaagcaggcgctggagacggtccagcggctgttgccggtgctgtgccaggcccacggcttgaccccggagcaggtggtggccatcgccagcaatattggtggcaagcaggcgctggagacggtgcaggcgctgttgccggtgctgtgccaggcccacggcttgaccccggagcaggtggtggccatcgccagcaatattggtggcaagcaggcgctggagacggtgcaggcgctgttgccggtgctgtgccaggcccacggcttgaccccggagcaggtggtggccatcgccagccacgatggcggcaagcaggcgctggagacggtccagcggctgttgccggtgctgtgccaggcccacggcttgaccccggagcaggtggtggccatcgccagccacgatggcggcaagcaggcgctggagacggtccagcggctgttgccggtgctgtgccaggcccacggcttgaccccggagcaggtggtggccatcgccagccacgatggcggcaagcaggcgctggagacggtccagcggctgttgccggtgctgtgccaggcccacggcttgaccccccagcaggtggtggccatcgccagcaatggcggtggcaagcaggcgctggagacggtccagcggctgttgccggtgctgtgccaggcccacggcttgaccccggagcaggtggtggccatcgccagccacgatggcggcaagcaggcgctggagacggtccagcggctgttgccggtgctgtgccaggcccacggcttgacccctcagcaggtggtggccatcgccagcaatggcggcggcaggccggcgctggagagcattgttgcccagttatctcgccctgatccgggatcctccggatctaaacgcaacaaaccaggtaaggccactggcaaaggtaaaccagtgaacaataagtggctgaacaacgctggcaaagacttgggttctccagtgccggatcgcattgccaacaagctgagagacaaagaattcaagagttttgatgactttcgcaagaaattctgggaagaagtgtctaaagatccagaactgtctaaacagtttagtcgcaacaacaatgacagaatgaaagttggtaaagctccgaagacccgcacccaagacgtgtctggcaaacgcaccagttttgaattgcatcatgaaaaaccaatctctcagaatggtggcgtttacgacatggacaacatctctgtggttactccgaaaagacatatcgatattcatcgcggtaaaggatcctcggccgactgataactcgagcgatcctctagacgagctcctcgagcctgcagcagctgaagctttggacttcttcgccagaggtttggtcaagtctccaatcaaggttgtcggcttgtctaccttgccagaaatttacgaaaagatggaaaagggtcaaatcgttggtagatacgttgttgacacttctaaataagcgaatttcttatgatttatgatttttattattaaataagttataaaaaaaataagtgtatacaaattttaaagtgactcttaggttttaaaacgaaaattcttattcttgagtaactctttcctgtaggtcaggttgctttctcaggtatagcatgaggtcgctcttattgaccacacctctaccggcatgcaagcttggcgtaatcatggtcatagctgtttcctgtgtgaaattgttatccgctcacaattccacacaacatacgagccggaagcataaagtgtaaagcctggggtgcctaatgagtgagctaactcacattaattgcgttgcgctcactgcccgctttccagtcgggaaacctgtcgtgccagcagatctattacattatgggtggtatgttggaataaaaatcaactatcatctactaactagtatttacgttactagtatattatcatatacggtgttagaagatgacgcaaatgatgagaaatagtcatctaaattagtggaagctgaaacgcaaggattgataatgtaataggatcaatgaatattaacatataaaatgatgataataatatttatagaattgtgtagaattgcagattcccttttatggattcctaaatcctcgaggagaacttctagtatatctacatacctaatattattgccttattaaaaatggaatcccaacaattacatcaaaatccacattctcttcaaaatcaattgtcctgtacttccttgttcatgtgtgttcaaaaacgttatatttataggataattatactctatttctcaacaagtaattggttgtttggccgagcggtctaaggcgcctgattcaagaaatatcttgaccgcagttaactgtgggaatactcaggtatcgtaagatgcaagagttcgaatctcttagcaaccattatttttttcctcaacataacgagaacacacaggggcgctatcgcacagaatcaaattcgatgactggaaattttttgttaatttcagaggtcgcctgacgcatatacctttttcaactgaaaaattgggagaaaaaggaaaggtgagagccgcggaaccggcttttcatatagaatagagaagcgttcatgactaaatgcttgcatcacaatacttgaagttgacaatattatttaaggacctattgttttttccaataggtggttagcaatcgtcttactttctaacttttcttaccttttacatttcagcaatatatatatatatatttcaaggatataccattctaatgtctgcccctaagaagatcgtcgttttgccaggtgaccacgttggtcaagaaatcacagccgaagccattaaggttcttaaagctatttctgatgttcgttccaatgtcaagttcgatttcgaaaatcatttaattggtggtgctgctatcgatgctacaggtgtcccacttccagatgaggcgctggaagcctccaagaaggttgatgccgttttgttaggtgctgtgggtggtcctaaatggggtaccggtagtgttagacctgaacaaggtttactaaaaatccgtaaagaacttcaattgtacgccaacttaagaccatgtaactttgcatccgactctcttttagacttatctccaatcaagccacaatttgctaaaggtactgacttcgttgttgtcagagaattagtgggaggtatttactttggtaagagaaaggaagacgatggtgatggtgtcgcttgggatagtgaacaatacaccgttccagaagtgcaaagaatcacaagaatggccgctttcatggccctacaacatgagccaccattgcctatttggtccttggataaagctaatgttttggcctcttcaagattatggagaaaaactgtggaggaaaccatcaagaacgaattccctacattgaaggttcaacatcaattgattgattctgccgccatgatcctagttaagaacccaacccacctaaatggtattataatcaccagcaacatgtttggtgatatcatctccgatgaagcctccgttatcccaggttccttgggtttgttgccatctgcgtccttggcctctttgccagacaagaacaccgcatttggtttgtacgaaccatgccacggttctgctccagatttgccaaagaataaggtcaaccctatcgccactatcttgtctgctgcaatgatgttgaaattgtcattgaacttgcctgaagaaggtaaggccattgaagatgcagttaaaaaggttttggatgcaggtatcagaactggtgatttaggtggttccaacagtaccacggaagtcggtgatgctgtcgccgaagaagttaagaaaatccttgcttaaaaagattctctttttttatgatatttgtacataaactttataaatgaaattcataatagaaacgacacgaaattacaaaatggaatatgttcatagggtagacgaaactatatacgcaatctacatacatttatcaagaaggagaaaaaggaggatgtaaaggaatacaggtaagcaaattgatactaatggctcaacgtgataaggaaaaagaattgcactttaacattaatattgacaaggaggagggcaccacacaaaaagttaggtgtaacagaaaatcatgaaactatgattcctaatttatatattggaggattttctctaaaaaaaaaaaaatacaacaaataaaaaacactcaatgacctgaccatttgatggagtttaagtcaataccttcttgaaccatttcccataatggtgaaagttccctcaagaattttactctgtcagaaacggccttaacgacgtagtcgacctcctcttcagtactaaatctaccaataccaaatctgatggaagaatgggctaatgcatcatccttacccagcgcatgtaaaacataagaaggttctagggaagcagatgtacaggctgaacccgaggataatgcgatatcccttagtgccatcaataaagattctccttccacgtaggcgaaagaaacgttaacacaccctggataacgatgatctggagatccgttcaacgtggtatgttcagcggataatagacctttgactaatttatcggatagtcttttgatgtgagcttggtcgttgtcaaattctttcttcatcaatctcgcagcttcaccaaatcccgctaccaatgggggggccaaagtaccagatctgctgcattaatgaatcggccaacgcgcggggagaggcggtttgcgtattgggcgctcttccgcttcctcgctcactgactcgctgcgctcggtcgttcggctgcggcgagcggtatcagcatcgatgaattccacggactatagactatactagtatactccgtctactgtacgatacacttccgctcaggtccttgtcctttaacgaggccttaccactcttttgttactctattgatccagctcagcaaaggcagtgtgatctaagattctatcttcgcgatgtagtaaaactagctagaccgagaaagagactagaaatgcaaaaggcacttctacaatggctgccatcattattatccgatgtgacgctgcagcttctcaatgatattcgaatacgctttgaggagatacagcctaatatccgacaaactgttttacagatttacgatcgtacttgttacccatcattgaattttgaacatccgaacctgggagttttccctgaaacagatagtatatttgaacctgtataataatatatagtctagcgctttacggaagacaatgtatgtatttcggttcctggagaaactattgcatctattgcataggtaatcttgcacgtcgcatccccggttcattttctgcgtttccatcttgcacttcaatagcatatctttgttaacgaagcatctgtgcttcattttgtagaacaaaaatgcaacgcgagagcgctaatttttcaaacaaagaatctgagctgcatttttacagaacagaaatgcaacgcgaaagcgctattttaccaacgaagaatctgtgcttcatttttgtaaaacaaaaatgcaacgcgagagcgctaatttttcaaacaaagaatctgagctgcatttttacagaacagaaatgcaacgcgagagcgctattttaccaacaaagaatctatacttcttttttgttctacaaaaatgcatcccgagagcgctatttttctaacaaagcatcttagattactttttttctcctttgtgcgctctataatgcagtctcttgataactttttgcactgtaggtccgttaaggttagaagaaggctactttggtgtctattttctcttccataaaaaaagcctgactccacttcccgcgtttactgattactagcgaagctgcgggtgcattttttcaagataaaggcatccccgattatattctataccgatgtggattgcgcatactttgtgaacagaaagtgatagcgttgatgattcttcattggtcagaaaattatgaacggtttcttctattttgtctctatatactacgtataggaaatgtttacattttcgtattgttttcgattcactctatgaatagttcttactacaatttttttgtctaaagagtaatactagagataaacataaaaaatgtagaggtcgagtttagatgcaagttcaaggagcgaaaggtggatgggtaggttatatagggatatagcacagagatatatagcaaagagatacttttgagcaatgtttgtggaagcggtattcgcaatattttagtagctcgttacagtccggtgcgtttttggttttttgaaagtgcgtcttcagagcgcttttggttttcaaaagcgctctgaagttcctatactttctagagaataggaacttcggaataggaacttcaaagcgtttccgaaaacgagcgcttccgaaaatgcaacgcgagctgcgcacatacagctcactgttcacgtcgcacctatatctgcgtgttgcctgtatatatatatacatgagaagaacggcatagtgcgtgtttatgcttaaatgcgtacttatatgcgtctatttatgtaggatgaaaggtagtctagtacctcctgtgatattatcccattccatgcggggtatcgtatgcttccttcagcactaccctttagctgttctatatgctgccactcctcaattggattagtctcatccttcaatgctatcatttcctttgatattggatcatatgcatagtaccgagaaactagtgcgaagtagtgatcaggtattgctgttatctgatgagtatacgttgtcctggccacggcagaagcacgcttatcgctccaatttcccacaacattagtcaactccgttaggcccttcattgaaagaaatgaggtcatcaaatgtcttccaatgtgagattttgggccattttttatagcaaagattgaataaggcgcatttttcttcaaagctttattgtacgatctgactaagttatcttttaataattggtattcctgtttattgcttgaagaattgccggtcctatttactcgttttaggactggttcagaattcatcgatgctcactcaaaggtcggtaatacggttatccacagaatcaggggataacgcaggaaagaacatgtgagcaaaaggccagcaaaaggccaggaaccgtaaaaaggccgcgttgctggcgttt

SEQ ID NO: 234 - DNA, 3509 bp, Artificial sequence
  pCLS9008
ggtctttcctgcgttatcccctgattctgtggataaccgtattaccgcctttgagtgagctgataccgctcgccgcagccgaacgaccgagcgcagcgagtcagtgagcgaggaagcggagagcgcccaatacgcaaaccgcctctccccgcgcgttggccgattcattaatgcagctggcacgacaggtttcccgactggaaagcgggcagtgagcgcaacgcaattaatgtgagttagctcactcattaggcaccccaggctttacactttatgcttccggctcgtatgttgtgtggaattgtgagcggataacaatttcacacaggaaacagctatgaccatgattacgccaagcgcgtcaattaaccctcactaaagggaacaaaagctgttaattaagcgcgccacacgcaaacacaaatacacagcggccttgccaccatggcaaacaccggtggatcctccggagtggatctacgcacgctcggctacagccagcagcaacaggagaagatcaaaccgaaggttcgttcgacagtggcgcagcaccacgaggcactggtcggccacgggtttacacacgcgcacatcgttgcgttaagccaacacccggcagcgttagggaccgtcgctgtcaagtatcaggacatgatcgcagcgttgccagaggcgacacacgaagcgatcgttggcgtcggcaaacagtggtccggcgcacgcgctctggaggccttgctcacggtggcgggagagttgagaggtccaccgttacagttggacacaggccaacttctcaagattgcaaaacgtggcggcgtgaccgcagtggaggcagtgcatgcatggcgcaatgcactgacgggtgccccgctcaacttgaccggagacgcccgggggatcaggtcacgtgcgtctcggagcattgttgcccagttatctcgccctgatccgtcggccgactgataagtcgaccaccaccaccaccaccactgataagagctcctcgagcctgcagcagctgaagctttggacttctggcgcgcccaattcgccctatagtgagtcgtattacgtcgcgctcactggccgtcgttttacaacgtcgtgactgggaaaaccctggcgttacccaacttaatcgccttgcagcacatccccctttcgccagctggcgtaatagcgaagaggcccgcaccgaaacgcccttcccaacagttgcgcagcctgaatggcgaatgggagcgccctgtagcggcgcattaagcgcggcgggtgtggtggttacgcgcagcgtgaccgctacacttgccagcgccctagcgcccgctcctttcgctttcttcccttcctttctcgccacgttcgccggctttccccgtcaagctctaaatcgggggctccctttagggttccgatttagtgctttacggcacctcgaccccaaaaaacttgattagggtgatggttggcctgtagtgggccatagccctgatagacggtttttcgccctttgacgttggagtccacgttctttaatagtggactcttgttccaaactggaacaacactcaaccctatctcggtctattcttttgatttataagggattttgccgatttcggcctattggttaaaaaatgagctgatttaacaaaaatttaacgcgaattttaacaaaatattaacgcttacaatttaggtggcacttttcggggaaatgtgcgcggaacccctatttgtttatttttctaaatacattcaaatatgtatccgctcatgagacaataaccctgataaatgcttcaataatattgaaaaaggaagagtatgagtattcaacatttccgtgtcgcccttattcccttttttgcggcattttgccttcctgtttttgctcacccagaaacgctggtgaaagtaaaagatgctgaagatcagttgggtgcacgagtgggttacatcgaactggatctcaacagcggtaagatccttgagagttttcgccccgaagaacgttttccaatgatgagcacttttaaagttctgctatgtggcgcggtattatcccgtattgacgccgggcaagagcaactcggtcgccgcatacactattctcagaatgacttggttgagtactcaccagtcacagaaaagcatcttacggatggcatgacagtaagagaattatgcagtgctgccataaccatgagtgataacactgcggccaacttacttctgacaacgatcggaggaccgaaggagctaaccgcttttttgcacaacatgggggatcatgtaactcgccttgatcgttgggaaccggagctgaatgaagccataccaaacgacgagcgtgacaccacgatgcctgtagcaatggcaacaacgttgcgcaaactattaactggcgaactacttactctagcttcccggcaacaattaatagactggatggaggcggataaagttgcaggaccacttctgcgctcggcccttccggctggctggtttattgctgataaatctggagccggtgagcgtggttctcgcggtatcattgcagcactggggccagatggtaagccctcccgtatcgtagttatctacacgacggggagtcaggcaactatggatgaacgaaatagacagatcgctgagataggtgcctcactgattaagcattggtaactgtcagaccaagtttactcatatatactttagattgatttaaaacttcatttttaatttaaaaggatctaggtgaagatcctttttgataatctcatgaccaaaatcccttaacgtgagttttcgttccactgagcgtcagaccccgtagaaaagatcaaaggatcttcttgagatcctttttttctgcgcgtaatctgctgcttgcaaacaaaaaaaccaccgctaccagcggtggtttgtttgccggatcaagagctaccaactctttttccgaaggtaactggcttcagcagagcgcagataccaaatactgttcttctagtgtagccgtagttaggccaccacttcaagaactctgtagcaccgcctacatacctcgctctgctaatcctgttaccagtggctgctgccagtggcgataagtcgtgtcttaccgggttggactcaagacgatagttaccggataaggcgcagcggtcgggctgaacggggggttcgtgcacacagcccagcttggagcgaacgacctacaccgaactgagatacctacagcgtgagctatgagaaagcgccacgcttcccgaagggagaaaggcggacaggtatccggtaagcggcagggtcggaacaggagagcgcacgagggagcttccagggggaaacgcctggtatctttatagtcctgtcgggtttcgccacctctgacttgagcgtcgatttttgtgatgctcgtcaggggggcggagcctatggaaaaacgccagcaacgcggcctttttacggttcctggccttttgctggccttttgctcacat

SEQ ID NO: 235 - DNA, 4049 bp, Artificial sequence
  pCLS12730
ggtctttcctgcgttatcccctgattctgtggataaccgtattaccgcctttgagtgagctgataccgctcgccgcagccgaacgaccgagcgcagcgagtcagtgagcgaggaagcggagagcgcccaatacgcaaaccgcctctccccgcgcgttggccgattcattaatgcagctggcacgacaggtttcccgactggaaagcgggcagtgagcgcaacgcaattaatgtgagttagctcactcattaggcaccccaggctttacactttatgcttccggctcgtatgttgtgtggaattgtgagcggataacaatttcacacaggaaacagctatgaccatgattacgccaagcgcgtcaattaaccctcactaaagggaacaaaagctgttaattaagcgcgccacacgcaaacacaaatacacagcggccttgccaccatggccaagtctggcatctaccagattaagaacaccctgaataacaaagtgtatgttggatctgccaaggactttgagaaaagatggaagaggcacttcaaggatctggaaaagggttgccacagctccatcaagctccaaaggtctttcaacaaacatggcaatgtctttgagtgctccattttggaagagatcccttatgaaaaggacctcattatagagagggaaaacttctggatcaaggagctgaactcaaaaatcaatggatacaacattgcagatgccacatttggtgacacctgttctactcacccccttaaggaagagatcattaaaaagaggtctgagactgtgaaggctaagatgttgaaactggggcctgatggcagaaaggcactctactctaagccaggtagcaaaaatggaaggtggaaccctgagacccacaagttctgcaaatgtggggtgagaatacagacatcagcctacacttgcagcaagtgtaggaacagatcaggagagaataactcctttttcaaccacaagcattctcaaggtccatccggagtggatctacgcacgctcggctacagccagcagcaacaggagaagatcaaaccgaaggttcgttcgacagtggcgcagcaccacgaggcactggtcggccacgggtttacacacgcgcacatcgttgcgttaagccaacacccggcagcgttagggaccgtcgctgtcaagtatcaggacatgatcgcagcgttgccagaggcgacacacgaagcgatcgttggcgtcggcaaacagtggtccggcgcacgcgctctggaggccttgctcacggtggcgggagagttgagaggtccaccgttacagttggacacaggccaacttctcaagattgcaaaacgtggcggcgtgaccgcagtggaggcagtgcatgcatggcgcaatgcactgacgggtgccccgctcaacttgaccggagacgcccgggggatcaggtcacgtgcgtctcggagcattgttgcccagttatctcgccctgatccgtcggccgactgataagtcgaccaccaccaccaccaccactgataagagctcctcgagcctgcagcagctgaagctttggacttctggcgcgcccaattcgccctatagtgagtcgtattacgtcgcgctcactggccgtcgttttacaacgtcgtgactgggaaaaccctggcgttacccaacttaatcgccttgcagcacatccccctttcgccagctggcgtaatagcgaagaggcccgcaccgaaacgcccttcccaacagttgcgcagcctgaatggcgaatgggagcgccctgtagcggcgcattaagcgcggcgggtgtggtggttacgcgcagcgtgaccgctacacttgccagcgccctagcgcccgctcctttcgctttcttcccttcctttctcgccacgttcgccggctttccccgtcaagctctaaatcgggggctccctttagggttccgatttagtgctttacggcacctcgaccccaaaaaacttgattagggtgatggttggcctgtagtgggccatagccctgatagacggtttttcgccctttgacgttggagtccacgttctttaatagtggactcttgttccaaactggaacaacactcaaccctatctcggtctattcttttgatttataagggattttgccgatttcggcctattggttaaaaaatgagctgatttaacaaaaatttaacgcgaattttaacaaaatattaacgcttacaatttaggtggcacttttcggggaaatgtgcgcggaacccctatttgtttatttttctaaatacattcaaatatgtatccgctcatgagacaataaccctgataaatgcttcaataatattgaaaaaggaagagtatgagtattcaacatttccgtgtcgcccttattcccttttttgcggcattttgccttcctgtttttgctcacccagaaacgctggtgaaagtaaaagatgctgaagatcagttgggtgcacgagtgggttacatcgaactggatctcaacagcggtaagatccttgagagttttcgccccgaagaacgttttccaatgatgagcacttttaaagttctgctatgtggcgcggtattatcccgtattgacgccgggcaagagcaactcggtcgccgcatacactattctcagaatgacttggttgagtactcaccagtcacagaaaagcatcttacggatggcatgacagtaagagaattatgcagtgctgccataaccatgagtgataacactgcggccaacttacttctgacaacgatcggaggaccgaaggagctaaccgcttttttgcacaacatgggggatcatgtaactcgccttgatcgttgggaaccggagctgaatgaagccataccaaacgacgagcgtgacaccacgatgcctgtagcaatggcaacaacgttgcgcaaactattaactggcgaactacttactctagcttcccggcaacaattaatagactggatggaggcggataaagttgcaggaccacttctgcgctcggcccttccggctggctggtttattgctgataaatctggagccggtgagcgtggttctcgcggtatcattgcagcactggggccagatggtaagccctcccgtatcgtagttatctacacgacggggagtcaggcaactatggatgaacgaaatagacagatcgctgagataggtgcctcactgattaagcattggtaactgtcagaccaagtttactcatatatactttagattgatttaaaacttcatttttaatttaaaaggatctaggtgaagatcctttttgataatctcatgaccaaaatcccttaacgtgagttttcgttccactgagcgtcagaccccgtagaaaagatcaaaggatcttcttgagatcctttttttctgcgcgtaatctgctgcttgcaaacaaaaaaaccaccgctaccagcggtggtttgtttgccggatcaagagctaccaactctttttccgaaggtaactggcttcagcagagcgcagataccaaatactgttcttctagtgtagccgtagttaggccaccacttcaagaactctgtagcaccgcctacatacctcgctctgctaatcctgttaccagtggctgctgccagtggcgataagtcgtgtcttaccgggttggactcaagacgatagttaccggataaggcgcagcggtcgggctgaacggggggttcgtgcacacagcccagcttggagcgaacgacctacaccgaactgagatacctacagcgtgagctatgagaaagcgccacgcttcccgaagggagaaaggcggacaggtatccggtaagcggcagggtcggaacaggagagcgcacgagggagcttccagggggaaacgcctggtatctttatagtcctgtcgggtttcgccacctctgacttgagcgtcgatttttgtgatgctcgtcaggggggcggagcctatggaaaaacgccagcaacgcggcctttttacggttcctggccttttgctggccttttgctcacat

SEQ ID NO: 236 - DNA, 5801 bp, Artificial sequence
  pCLS12731
ggtctttcctgcgttatcccctgattctgtggataaccgtattaccgcctttgagtgagctgataccgctcgccgcagccgaacgaccgagcgcagcgagtcagtgagcgaggaagcggagagcgcccaatacgcaaaccgcctctccccgcgcgttggccgattcattaatgcagctggcacgacaggtttcccgactggaaagcgggcagtgagcgcaacgcaattaatgtgagttagctcactcattaggcaccccaggctttacactttatgcttccggctcgtatgttgtgtggaattgtgagcggataacaatttcacacaggaaacagctatgaccatgattacgccaagcgcgtcaattaaccctcactaaagggaacaaaagctgttaattaagcgcgccacacgcaaacacaaatacacagcggccttgccaccatggccaagtctggcatctaccagattaagaacaccctgaataacaaagtgtatgttggatctgccaaggactttgagaaaagatggaagaggcacttcaaggatctggaaaagggttgccacagctccatcaagctccaaaggtctttcaacaaacatggcaatgtctttgagtgctccattttggaagagatcccttatgaaaaggacctcattatagagagggaaaacttctggatcaaggagctgaactcaaaaatcaatggatacaacattgcagatgccacatttggtgacacctgttctactcacccccttaaggaagagatcattaaaaagaggtctgagactgtgaaggctaagatgttgaaactggggcctgatggcagaaaggcactctactctaagccaggtagcaaaaatggaaggtggaaccctgagacccacaagttctgcaaatgtggggtgagaatacagacatcagcctacacttgcagcaagtgtaggaacagatcaggagagaataactcctttttcaaccacaagcattctcaaggtccatccggagtggatctacgcacgctcggctacagccagcagcaacaggagaagatcaaaccgaaggttcgttcgacagtggcgcagcaccacgaggcactggtcggccacgggtttacacacgcgcacatcgttgcgttaagccaacacccggcagcgttagggaccgtcgctgtcaagtatcaggacatgatcgcagcgttgccagaggcgacacacgaagcgatcgttggcgtcggcaaacagtggtccggcgcacgcgctctggaggccttgctcacggtggcgggagagttgagaggtccaccgttacagttggacacaggccaacttctcaagattgcaaaacgtggcggcgtgaccgcagtggaggcagtgcatgcatggcgcaatgcactgacgggtgccccgctcaacttgaccccggagcaggtggtggccatcgccagccacgatggcggcaagcaggcgctggagacggtccagcggctgttgccggtgctgtgccaggcccacggcttgaccccccagcaggtggtggccatcgccagcaatggcggtggcaagcaggcgctggagacggtccagcggctgttgccggtgctgtgccaggcccacggcttgaccccggagcaggtggtggccatcgccagcaatattggtggcaagcaggcgctggagacggtgcaggcgctgttgccggtgctgtgccaggcccacggcttgaccccccagcaggtggtggccatcgccagcaatggcggtggcaagcaggcgctggagacggtccagcggctgttgccggtgctgtgccaggcccacggcttgaccccggagcaggtggtggccatcgccagcaatattggtggcaagcaggcgctggagacggtgcaggcgctgttgccggtgctgtgccaggcccacggcttgaccccggagcaggtggtggccatcgccagcaatattggtggcaagcaggcgctggagacggtgcaggcgctgttgccggtgctgtgccaggcccacggcttgaccccggagcaggtggtggccatcgccagcaatattggtggcaagcaggcgctggagacggtgcaggcgctgttgccggtgctgtgccaggcccacggcttgaccccggagcaggtggtggccatcgccagccacgatggcggcaagcaggcgctggagacggtccagcggctgttgccggtgctgtgccaggcccacggcttgaccccggagcaggtggtggccatcgccagccacgatggcggcaagcaggcgctggagacggtccagcggctgttgccggtgctgtgccaggcccacggcttgaccccccagcaggtggtggccatcgccagcaatggcggtggcaagcaggcgctggagacggtccagcggctgttgccggtgctgtgccaggcccacggcttgaccccggagcaggtggtggccatcgccagcaatattggtggcaagcaggcgctggagacggtgcaggcgctgttgccggtgctgtgccaggcccacggcttgaccccggagcaggtggtggccatcgccagcaatattggtggcaagcaggcgctggagacggtgcaggcgctgttgccggtgctgtgccaggcccacggcttgaccccggagcaggtggtggccatcgccagccacgatggcggcaagcaggcgctggagacggtccagcggctgttgccggtgctgtgccaggcccacggcttgaccccggagcaggtggtggccatcgccagccacgatggcggcaagcaggcgctggagacggtccagcggctgttgccggtgctgtgccaggcccacggcttgaccccggagcaggtggtggccatcgccagccacgatggcggcaagcaggcgctggagacggtccagcggctgttgccggtgctgtgccaggcccacggcttgaccccccagcaggtggtggccatcgccagcaatggcggtggcaagcaggcgctggagacggtccagcggctgttgccggtgctgtgccaggcccacggcttgaccccggagcaggtggtggccatcgccagccacgatggcggcaagcaggcgctggagacggtccagcggctgttgccggtgctgtgccaggcccacggcttgacccctcagcaggtggtggccatcgccagcaatggcggcggcaggccggcgctggagagcattgttgcccagttatctcgccctgatccgtcggccgactgataagtcgaccaccaccaccaccaccactgataagagctcctcgagcctgcagcagctgaagctttggacttctggcgcgcccaattcgccctatagtgagtcgtattacgtcgcgctcactggccgtcgttttacaacgtcgtgactgggaaaaccctggcgttacccaacttaatcgccttgcagcacatccccctttcgccagctggcgtaatagcgaagaggcccgcaccgaaacgcccttcccaacagttgcgcagcctgaatggcgaatgggagcgccctgtagcggcgcattaagcgcggcgggtgtggtggttacgcgcagcgtgaccgctacacttgccagcgccctagcgcccgctcctttcgctttcttcccttcctttctcgccacgttcgccggctttccccgtcaagctctaaatcgggggctccctttagggttccgatttagtgctttacggcacctcgaccccaaaaaacttgattagggtgatggttggcctgtagtgggccatagccctgatagacggtttttcgccctttgacgttggagtccacgttctttaatagtggactcttgttccaaactggaacaacactcaaccctatctcggtctattcttttgatttataagggattttgccgatttcggcctattggttaaaaaatgagctgatttaacaaaaatttaacgcgaattttaacaaaatattaacgcttacaatttaggtggcacttttcggggaaatgtgcgcggaacccctatttgtttatttttctaaatacattcaaatatgtatccgctcatgagacaataaccctgataaatgcttcaataatattgaaaaaggaagagtatgagtattcaacatttccgtgtcgcccttattcccttttttgcggcattttgccttcctgtttttgctcacccagaaacgctggtgaaagtaaaagatgctgaagatcagttgggtgcacgagtgggttacatcgaactggatctcaacagcggtaagatccttgagagttttcgccccgaagaacgttttccaatgatgagcacttttaaagttctgctatgtggcgcggtattatcccgtattgacgccgggcaagagcaactcggtcgccgcatacactattctcagaatgacttggttgagtactcaccagtcacagaaaagcatcttacggatggcatgacagtaagagaattatgcagtgctgccataaccatgagtgataacactgcggccaacttacttctgacaacgatcggaggaccgaaggagctaaccgcttttttgcacaacatgggggatcatgtaactcgccttgatcgttgggaaccggagctgaatgaagccataccaaacgacgagcgtgacaccacgatgcctgtagcaatggcaacaacgttgcgcaaactattaactggcgaactacttactctagcttcccggcaacaattaatagactggatggaggcggataaagttgcaggaccacttctgcgctcggcccttccggctggctggtttattgctgataaatctggagccggtgagcgtggttctcgcggtatcattgcagcactggggccagatggtaagccctcccgtatcgtagttatctacacgacggggagtcaggcaactatggatgaacgaaatagacagatcgctgagataggtgcctcactgattaagcattggtaactgtcagaccaagtttactcatatatactttagattgatttaaaacttcatttttaatttaaaaggatctaggtgaagatcctttttgataatctcatgaccaaaatcccttaacgtgagttttcgttccactgagcgtcagaccccgtagaaaagatcaaaggatcttcttgagatcctttttttctgcgcgtaatctgctgcttgcaaacaaaaaaaccaccgctaccagcggtggtttgtttgccggatcaagagctaccaactctttttccgaaggtaactggcttcagcagagcgcagataccaaatactgttcttctagtgtagccgtagttaggccaccacttcaagaactctgtagcaccgcctacatacctcgctctgctaatcctgttaccagtggctgctgccagtggcgataagtcgtgtcttaccgggttggactcaagacgatagttaccggataaggcgcagcggtcgggctgaacggggggttcgtgcacacagcccagcttggagcgaacgacctacaccgaactgagatacctacagcgtgagctatgagaaagcgccacgcttcccgaagggagaaaggcggacaggtatccggtaagcggcagggtcggaacaggagagcgcacgagggagcttccagggggaaacgcctggtatctttatagtcctgtcgggtttcgccacctctgacttgagcgtcgatttttgtgatgctcgtcaggggggcggagcctatggaaaaacgccagcaacgcggcctttttacggttcctggccttttgctggccttttgctcacat

SEQ ID NO: 237 - DNA, 11112 bp, Artificial sequence
  pCLS8522
atgtgagcaaaaggccagcaaaaggccaggaaccgtaaaaaggccgcgttgctggcgtttttccataggctccgcccccctgacgagcatcacaaaaatcgacgctcaagtcagaggtggcgaaacccgacaggactataaagataccaggcgtttccccctggaagctccctcgtgcgctctcctgttccgaccctgccgcttaccggatacctgtccgcctttctcccttcgggaagcgtggcgctttctcatagctcacgctgtaggtatctcagttcggtgtaggtcgttcgctccaagctgggctgtgtgcacgaaccccccgttcagcccgaccgctgcgccttatccggtaactatcgtcttgagtccaacccggtaagacacgacttatcgccactggcagcagccactggtaacaggattagcagagcgaggtatgtaggcggtgctacagagttcttgaagtggtggcctaactacggctacactagaaggacagtatttggtatctgcgctctgctgaagccagttaccttcggaaaaagagttggtagctcttgatccggcaaacaaaccaccgctggtagcggtggtttttttgtttgcaagcagcagattacgcgcagaaaaaaaggatctcaagaagatcctttgatcttttctacggggtctgacgctcagtggaacgaaaactcacgttaagggattttggtcatgagattatcaaaaaggatcttcacctagatccttttaaattaaaaatgaagttttaaatcaatctaaagtatatatgagtaaacttggtctgacagttaccaatgcttaatcagtgaggcacctatctcagcgatctgtctatttcgttcatccatagttgcctgactccccgtcgtgtagataactacgatacgggagggcttaccatctggccccagtgctgcaatgataccgcgagacccacgctcaccggctccagatttatcagcaataaaccagccagccggaagggccgagcgcagaagtggtcctgcaactttatccgcctccatccagtctattaattgttgccgggaagctagagtaagtagttcgccagttaatagtttgcgcaacgttgttgccattgctacaggcatcgtggtgtcacgctcgtcgtttggtatggcttcattcagctccggttcccaacgatcaaggcgagttacatgatcccccatgttgtgcaaaaaagcggttagctccttcggtcctccgatcgttgtcagaagtaagttggccgcagtgttatcactcatggttatggcagcactgcataattctcttactgtcatgccatccgtaagatgcttttctgtgactggtgagtactcaaccaagtcattctgagaatagtgtatgcggcgaccgagttgctcttgcccggcgtcaatacgggataataccgcgccacatagcagaactttaaaagtgctcatcattggaaaacgttcttcggggcgaaaactctcaaggatcttaccgctgttgagatccagttcgatgtaacccactcgtgcacccaactgatcttcagcatcttttactttcaccagcgtttctgggtgagcaaaaacaggaaggcaaaatgccgcaaaaaagggaataagggcgacacggaaatgttgaatactcatactcttcctttttcaatattattgaagcatttatcagggttattgtctcatgagcggatacatatttgaatgtatttagaaaaataaacaaataggggttccgcgcacatttccccgaaaagtgccacctgacgtccgatcaaaaatcatcgcttcgctgattaattaccccagaaataaggctaaaaaactaatcgcattatcatcctatggttgttaatttgattcgttcatttgaaggtttgtggggccaggttactgccaatttttcctcttcataaccataaaagctagtattgtagaatctttattgttcggagcagtgcggcgcgaggcacatctgcgtttcaggaacgcgaccggtgaagacgaggacgcacggaggagagtcttccttcggagggctgtcacccgctcggcggcttctaatccgtacttcaatatagcaatgagcagttaagcgtattactgaaagttccaaagagaaggtttttttaggctaatcgacctcgagcagatccgccaggcgtgtatatagcgtggatggccaggcaactttagtgctgacacatacaggcatatatatatgtgtgcgacgacacatgatcatatggcatgcatgtgctctgtatgtatataaaactcttgttttcttcttttctctaaatattctttccttatacattaggtcctttgtagcataaattactatacttctatagacacgcaaacacaaatacacagcggccttgccaccatggccaagtctggcatctaccagattaagaacaccctgaataacaaagtgtatgttggatctgccaaggactttgagaaaagatggaagaggcacttcaaggatctggaaaagggttgccacagctccatcaagctccaaaggtctttcaacaaacatggcaatgtctttgagtgctccattttggaagagatcccttatgaaaaggacctcattatagagagggaaaacttctggatcaaggagctgaactcaaaaatcaatggatacaacattgcagatgccacatttggtgacacctgttctactcacccccttaaggaagagatcattaaaaagaggtctgagactgtgaaggctaagatgttgaaactggggcctgatggcagaaaggcactctactctaagccaggtagcaaaaatggaaggtggaaccctgagacccacaagttctgcaaatgtggggtgagaatacagacatcagcctacacttgcagcaagtgtaggaacagatcaggagagaataactcctttttcaaccacaagcattctcaaggtccatccggagtggatctacgcacgctcggctacagccagcagcaacaggagaagatcaaaccgaaggttcgttcgacagtggcgcagcaccacgaggcactggtcggccacgggtttacacacgcgcacatcgttgcgttaagccaacacccggcagcgttagggaccgtcgctgtcaagtatcaggacatgatcgcagcgttgccagaggcgacacacgaagcgatcgttggcgtcggcaaacagtggtccggcgcacgcgctctggaggccttgctcacggtggcgggagagttgagaggtccaccgttacagttggacacaggccaacttctcaagattgcaaaacgtggcggcgtgaccgcagtggaggcagtgcatgcatggcgcaatgcactgacgggtgccccgctcaacttgaccccggagcaggtggtggccatcgccagccacgatggcggcaagcaggcgctggagacggtccagcggctgttgccggtgctgtgccaggcccacggcttgaccccccagcaggtggtggccatcgccagcaatggcggtggcaagcaggcgctggagacggtccagcggctgttgccggtgctgtgccaggcccacggcttgaccccggagcaggtggtggccatcgccagcaatattggtggcaagcaggcgctggagacggtgcaggcgctgttgccggtgctgtgccaggcccacggcttgaccccccagcaggtggtggccatcgccagcaatggcggtggcaagcaggcgctggagacggtccagcggctgttgccggtgctgtgccaggcccacggcttgaccccggagcaggtggtggccatcgccagcaatattggtggcaagcaggcgctggagacggtgcaggcgctgttgccggtgctgtgccaggcccacggcttgaccccggagcaggtggtggccatcgccagcaatattggtggcaagcaggcgctggagacggtgcaggcgctgttgccggtgctgtgccaggcccacggcttgaccccggagcaggtggtggccatcgccagcaatattggtggcaagcaggcgctggagacggtgcaggcgctgttgccggtgctgtgccaggcccacggcttgaccccggagcaggtggtggccatcgccagccacgatggcggcaagcaggcgctggagacggtccagcggctgttgccggtgctgtgccaggcccacggcttgaccccggagcaggtggtggccatcgccagccacgatggcggcaagcaggcgctggagacggtccagcggctgttgccggtgctgtgccaggcccacggcttgaccccccagcaggtggtggccatcgccagcaatggcggtggcaagcaggcgctggagacggtccagcggctgttgccggtgctgtgccaggcccacggcttgaccccggagcaggtggtggccatcgccagcaatattggtggcaagcaggcgctggagacggtgcaggcgctgttgccggtgctgtgccaggcccacggcttgaccccggagcaggtggtggccatcgccagcaatattggtggcaagcaggcgctggagacggtgcaggcgctgttgccggtgctgtgccaggcccacggcttgaccccggagcaggtggtggccatcgccagccacgatggcggcaagcaggcgctggagacggtccagcggctgttgccggtgctgtgccaggcccacggcttgaccccggagcaggtggtggccatcgccagccacgatggcggcaagcaggcgctggagacggtccagcggctgttgccggtgctgtgccaggcccacggcttgaccccggagcaggtggtggccatcgccagccacgatggcggcaagcaggcgctggagacggtccagcggctgttgccggtgctgtgccaggcccacggcttgaccccccagcaggtggtggccatcgccagcaatggcggtggcaagcaggcgctggagacggtccagcggctgttgccggtgctgtgccaggcccacggcttgaccccggagcaggtggtggccatcgccagccacgatggcggcaagcaggcgctggagacggtccagcggctgttgccggtgctgtgccaggcccacggcttgacccctcagcaggtggtggccatcgccagcaatggcggcggcaggccggcgctggagagcattgttgcccagttatctcgccctgatccgtcggccgactgataactcgagcgatcctctagacgagctcctcgagcctgcagcagctgaagctttggacttcttcgccagaggtttggtcaagtctccaatcaaggttgtcggcttgtctaccttgccagaaatttacgaaaagatggaaaagggtcaaatcgttggtagatacgttgttgacacttctaaataagcgaatttcttatgatttatgatttttattattaaataagttataaaaaaaataagtgtatacaaattttaaagtgactcttaggttttaaaacgaaaattcttattcttgagtaactctttcctgtaggtcaggttgctttctcaggtatagcatgaggtcgctcttattgaccacacctctaccggcatgcaagcttggcgtaatcatggtcatagctgtttcctgtgtgaaattgttatccgctcacaattccacacaacatacgagccggaagcataaagtgtaaagcctggggtgcctaatgagtgagctaactcacattaattgcgttgcgctcactgcccgctttccagtcgggaaacctgtcgtgccagcagatctattacattatgggtggtatgttggaataaaaatcaactatcatctactaactagtatttacgttactagtatattatcatatacggtgttagaagatgacgcaaatgatgagaaatagtcatctaaattagtggaagctgaaacgcaaggattgataatgtaataggatcaatgaatattaacatataaaatgatgataataatatttatagaattgtgtagaattgcagattcccttttatggattcctaaatcctcgaggagaacttctagtatatctacatacctaatattattgccttattaaaaatggaatcccaacaattacatcaaaatccacattctcttcaaaatcaattgtcctgtacttccttgttcatgtgtgttcaaaaacgttatatttataggataattatactctatttctcaacaagtaattggttgtttggccgagcggtctaaggcgcctgattcaagaaatatcttgaccgcagttaactgtgggaatactcaggtatcgtaagatgcaagagttcgaatctcttagcaaccattatttttttcctcaacataacgagaacacacaggggcgctatcgcacagaatcaaattcgatgactggaaattttttgttaatttcagaggtcgcctgacgcatatacctttttcaactgaaaaattgggagaaaaaggaaaggtgagagccgcggaaccggcttttcatatagaatagagaagcgttcatgactaaatgcttgcatcacaatacttgaagttgacaatattatttaaggacctattgttttttccaataggtggttagcaatcgtcttactttctaacttttcttaccttttacatttcagcaatatatatatatatatttcaaggatataccattctaatgtctgcccctaagaagatcgtcgttttgccaggtgaccacgttggtcaagaaatcacagccgaagccattaaggttcttaaagctatttctgatgttcgttccaatgtcaagttcgatttcgaaaatcatttaattggtggtgctgctatcgatgctacaggtgtcccacttccagatgaggcgctggaagcctccaagaaggttgatgccgttttgttaggtgctgtgggtggtcctaaatggggtaccggtagtgttagacctgaacaaggtttactaaaaatccgtaaagaacttcaattgtacgccaacttaagaccatgtaactttgcatccgactctcttttagacttatctccaatcaagccacaatttgctaaaggtactgacttcgttgttgtcagagaattagtgggaggtatttactttggtaagagaaaggaagacgatggtgatggtgtcgcttgggatagtgaacaatacaccgttccagaagtgcaaagaatcacaagaatggccgctttcatggccctacaacatgagccaccattgcctatttggtccttggataaagctaatgttttggcctcttcaagattatggagaaaaactgtggaggaaaccatcaagaacgaattccctacattgaaggttcaacatcaattgattgattctgccgccatgatcctagttaagaacccaacccacctaaatggtattataatcaccagcaacatgtttggtgatatcatctccgatgaagcctccgttatcccaggttccttgggtttgttgccatctgcgtccttggcctctttgccagacaagaacaccgcatttggtttgtacgaaccatgccacggttctgctccagatttgccaaagaataaggtcaaccctatcgccactatcttgtctgctgcaatgatgttgaaattgtcattgaacttgcctgaagaaggtaaggccattgaagatgcagttaaaaaggttttggatgcaggtatcagaactggtgatttaggtggttccaacagtaccacggaagtcggtgatgctgtcgccgaagaagttaagaaaatccttgcttaaaaagattctctttttttatgatatttgtacataaactttataaatgaaattcataatagaaacgacacgaaattacaaaatggaatatgttcatagggtagacgaaactatatacgcaatctacatacatttatcaagaaggagaaaaaggaggatgtaaaggaatacaggtaagcaaattgatactaatggctcaacgtgataaggaaaaagaattgcactttaacattaatattgacaaggaggagggcaccacacaaaaagttaggtgtaacagaaaatcatgaaactatgattcctaatttatatattggaggattttctctaaaaaaaaaaaaatacaacaaataaaaaacactcaatgacctgaccatttgatggagtttaagtcaataccttcttgaaccatttcccataatggtgaaagttccctcaagaattttactctgtcagaaacggccttaacgacgtagtcgacctcctcttcagtactaaatctaccaataccaaatctgatggaagaatgggctaatgcatcatccttacccagcgcatgtaaaacataagaaggttctagggaagcagatgtacaggctgaacccgaggataatgcgatatcccttagtgccatcaataaagattctccttccacgtaggcgaaagaaacgttaacacaccctggataacgatgatctggagatccgttcaacgtggtatgttcagcggataatagacctttgactaatttatcggatagtcttttgatgtgagcttggtcgttgtcaaattctttcttcatcaatctcgcagcttcaccaaatcccgctaccaatgggggggccaaagtaccagatctgctgcattaatgaatcggccaacgcgcggggagaggcggtttgcgtattgggcgctcttccgcttcctcgctcactgactcgctgcgctcggtcgttcggctgcggcgagcggtatcagcatcgatgaattccacggactatagactatactagtatactccgtctactgtacgatacacttccgctcaggtccttgtcctttaacgaggccttaccactcttttgttactctattgatccagctcagcaaaggcagtgtgatctaagattctatcttcgcgatgtagtaaaactagctagaccgagaaagagactagaaatgcaaaaggcacttctacaatggctgccatcattattatccgatgtgacgctgcagcttctcaatgatattcgaatacgctttgaggagatacagcctaatatccgacaaactgttttacagatttacgatcgtacttgttacccatcattgaattttgaacatccgaacctgggagttttccctgaaacagatagtatatttgaacctgtataataatatatagtctagcgctttacggaagacaatgtatgtatttcggttcctggagaaactattgcatctattgcataggtaatcttgcacgtcgcatccccggttcattttctgcgtttccatcttgcacttcaatagcatatctttgttaacgaagcatctgtgcttcattttgtagaacaaaaatgcaacgcgagagcgctaatttttcaaacaaagaatctgagctgcatttttacagaacagaaatgcaacgcgaaagcgctattttaccaacgaagaatctgtgcttcatttttgtaaaacaaaaatgcaacgcgagagcgctaatttttcaaacaaagaatctgagctgcatttttacagaacagaaatgcaacgcgagagcgctattttaccaacaaagaatctatacttcttttttgttctacaaaaatgcatcccgagagcgctatttttctaacaaagcatcttagattactttttttctcctttgtgcgctctataatgcagtctcttgataactttttgcactgtaggtccgttaaggttagaagaaggctactttggtgtctattttctcttccataaaaaaagcctgactccacttcccgcgtttactgattactagcgaagctgcgggtgcattttttcaagataaaggcatccccgattatattctataccgatgtggattgcgcatactttgtgaacagaaagtgatagcgttgatgattcttcattggtcagaaaattatgaacggtttcttctattttgtctctatatactacgtataggaaatgtttacattttcgtattgttttcgattcactctatgaatagttcttactacaatttttttgtctaaagagtaatactagagataaacataaaaaatgtagaggtcgagtttagatgcaagttcaaggagcgaaaggtggatgggtaggttatatagggatatagcacagagatatatagcaaagagatacttttgagcaatgtttgtggaagcggtattcgcaatattttagtagctcgttacagtccggtgcgtttttggttttttgaaagtgcgtcttcagagcgcttttggttttcaaaagcgctctgaagttcctatactttctagagaataggaacttcggaataggaacttcaaagcgtttccgaaaacgagcgcttccgaaaatgcaacgcgagctgcgcacatacagctcactgttcacgtcgcacctatatctgcgtgttgcctgtatatatatatacatgagaagaacggcatagtgcgtgtttatgcttaaatgcgtacttatatgcgtctatttatgtaggatgaaaggtagtctagtacctcctgtgatattatcccattccatgcggggtatcgtatgcttccttcagcactaccctttagctgttctatatgctgccactcctcaattggattagtctcatccttcaatgctatcatttcctttgatattggatcatatgcatagtaccgagaaactagtgcgaagtagtgatcaggtattgctgttatctgatgagtatacgttgtcctggccacggcagaagcacgcttatcgctccaatttcccacaacattagtcaactccgttaggcccttcattgaaagaaatgaggtcatcaaatgtcttccaatgtgagattttgggccattttttatagcaaagattgaataaggcgcatttttcttcaaagctttattgtacgatctgactaagttatcttttaataattggtattcctgtttattgcttgaagaattgccggtcctatttactcgttttaggactggttcagaattcatcgatgctcactcaaaggtcggtaatacggttatccacagaatcaggggataacgcaggaaagaac

SEQ ID NO: 238 - DNA, 61 bp, Artificial sequence
  Avr25RAGT2R
tatataaacctaaccctctactagcatgaaggtaccttgtcgttataagtaaccataaaca

SEQ ID NO: 239 - DNA, 39 bp, Artificial sequence
  CMP_G001
acacgcaaacacaaatacacagcggccttgccaccatgg

SEQ ID NO: 240 - DNA, 37 bp, Artificial sequence
  CMP_G068
ggtatttccggatggaccttgagaatgcttgtggttg

SEQ ID NO: 241 - DNA, 6017 bp, Artificial sequence
  pCLS7763
atgtgagcaaaaggccagcaaaaggccaggaaccgtaaaaaggccgcgttgctggcgtttttccataggctccgcccccctgacgagcatcacaaaaatcgacgctcaagtcagaggtggcgaaacccgacaggactataaagataccaggcgtttccccctggaagctccctcgtgcgctctcctgttccgaccctgccgcttaccggatacctgtccgcctttctcccttcgggaagcgtggcgctttctcatagctcacgctgtaggtatctcagttcggtgtaggtcgttcgctccaagctgggctgtgtgcacgaaccccccgttcagcccgaccgctgcgccttatccggtaactatcgtcttgagtccaacccggtaagacacgacttatcgccactggcagcagccactggtaacaggattagcagagcgaggtatgtaggcggtgctacagagttcttgaagtggtggcctaactacggctacactagaaggacagtatttggtatctgcgctctgctgaagccagttaccttcggaaaaagagttggtagctcttgatccggcaaacaaaccaccgctggtagcggtggtttttttgtttgcaagcagcagattacgcgcagaaaaaaaggatctcaagaagatcctttgatcttttctacggggtctgacgctcagtggaacgaaaactcacgttaagggattttggtcatgagcggatacatatttgaatgtatttagaaaaataaacaaataggggttccgcgcacatttccccgaaaagtgccacctgacgtccgatcaaaaatcatcgcttcgctgattaattaccccagaaataaggctaaaaaactaatcgcattatcatcctatggttgttaatttgattcgttcatttgaaggtttgtggggccaggttactgccaatttttcctcttcataaccataaaagctagtattgtagaatctttattgttcggagcagtgcggcgcgaggcacatctgcgtttcaggaacgcgaccggtgaagacgaggacgcacggaggagagtcttccttcggagggctgtcacccgctcggcggcttctaatccgtacttcaatatagcaatgagcagttaagcgtattactgaaagttccaaagagaaggtttttttaggctaatcgacctcgagcagatccgccaggcgtgtatatagcgtggatggccaggcaactttagtgctgacacatacaggcatatatatatgtgtgcgacgacacatgatcatatggcatgcatgtgctctgtatgtatataaaactcttgttttcttcttttctctaaatattctttccttatacattaggtcctttgtagcataaattactatacttctatagacacgcaaacacaaatacacagcggccttgccaccatggccggcgcgcccactatgtgtgcggccgactgataactcgagcgatcctctagacgagctcctcgagcctgcagcagctgaagctttggacttcttcgccagaggtttggtcaagtctccaatcaaggttgtcggcttgtctaccttgccagaaatttacgaaaagatggaaaagggtcaaatcgttggtagatacgttgttgacacttctaaataagcgaatttcttatgatttatgatttttattattaaataagttataaaaaaaataagtgtatacaaattttaaagtgactcttaggttttaaaacgaaaattcttattcttgagtaactctttcctgtaggtcaggttgctttctcaggtatagcatgaggtcgctcttattgaccacacctctaccggcatgcaagcttggcgtaatcatggtcatagctgtttcctgtgtgaaattgttatccgctcacaattccacacaacatacgagccggaagcataaagtgtaaagcctggggtgcctaatgagtgagctaactcacattaattgcgttgcgctcactgcccgctttccagtcgggaaacctgtcgtgccagcagatctgtttagcttgcctcgtccccgccgggtcacccggccagcgacatggaggcccagaataccctccttgacagtcttgacgtgcgcagctcaggggcatgatgtgactgtcgcccgtacatttagcccatacatccccatgtataatcatttgcatccatacattttgatggccgcacggcgcgaagcaaaaattacggctcctcgctgcagacctgcgagcagggaaacgctcccctcacagacgcgttgaattgtccccacgccgcgcccctgtagagaaatataaaaggttaggatttgccactgaggttcttctttcatatacttccttttaaaatcttgctaggatacagttctcacatcacatccgaacataaacaaccatgcatgggtaaggaaaagactcacgtttcgaggccgcgattaaattccaacatggatgctgatttatatgggtataaatgggctcgcgataatgtcgggcaatcaggtgcgacaatctatcgattgtatgggaagcccgatgcgccagagttgtttctgaaacatggcaaaggtagcgttgccaatgatgttacagatgagatggtcagactaaactggctgacggaatttatgcctcttccgaccatcaagcattttatccgtactcctgatgatgcatggttactcaccactgcgatccccggcaaaacagcattccaggtattagaagaatatcctgattcaggtgaaaatattgttgatgcgctggcagtgttcctgcgccggttgcattcgattcctgtttgtaattgtccttttaacagcgatcgcgtatttcgcctcgctcaggcgcaatcacgaatgaataacggtttggttgatgcgagtgattttgatgacgagcgtaatggctggcctgttgaacaagtctggaaagaaatgcataagcttttgccattctcaccggattcagtcgtcactcatggtgatttctcacttgataaccttatttttgacgaggggaaattaataggttgtattgatgttggacgagtcggaatcgcagaccgataccaggatcttgccatcctatggaactgcctcggtgagttttctccttcattacagaaacggctttttcaaaaatatggtattgataatcctgatatgaataaattgcagtttcatttgatgctcgatgagtttttctaatcagtactgacaataaaaagattcttgttttcaagaacttgtcatttgtatagtttttttatattgtagttgttctattttaatcaaatgttagcgtgatttatattttttttcgcctcgacatcatctgcccagatgcgaagttaagtgcgcagaaagtaatatcatgcgtcaatcgtatgtgaatgctggtcgctatactgctgtcgattcgatactaacgccgccatccagtgtcgaaaacgagctcgaattcatcgatgatatcagatccactagtggcctatgcgaccgcggatctgccggtctccctatagtgagtcgtattaatttcgataagccaggttaacctgcattaatgaatcggccaacgcgcggggagaggcggtttgcgtattgggcgctcttccgcttcctcgctcactgactcgctgcgctcggtcgttcggctgcggcgagcggtatcagcatcgatgaattccacggactatagactatactagtatactccgtctactgtacgatacacttccgctcaggtccttgtcctttaacgaggccttaccactcttttgttactctattgatccagctcagcaaaggcagtgtgatctaagattctatcttcgcgatgtagtaaaactagctagaccgagaaagagactagaaatgcaaaaggcacttctacaatggctgccatcattattatccgatgtgacgctgcagcttctcaatgatattcgaatacgctttgaggagatacagcctaatatccgacaaactgttttacagatttacgatcgtacttgttacccatcattgaattttgaacatccgaacctgggagttttccctgaaacagatagtatatttgaacctgtataataatatatagtctagcgctttacggaagacaatgtatgtatttcggttcctggagaaactattgcatctattgcataggtaatcttgcacgtcgcatccccggttcattttctgcgtttccatcttgcacttcaatagcatatctttgttaacgaagcatctgtgcttcattttgtagaacaaaaatgcaacgcgagagcgctaatttttcaaacaaagaatctgagctgcatttttacagaacagaaatgcaacgcgaaagcgctattttaccaacgaagaatctgtgcttcatttttgtaaaacaaaaatgcaacgcgagagcgctaatttttcaaacaaagaatctgagctgcatttttacagaacagaaatgcaacgcgagagcgctattttaccaacaaagaatctatacttcttttttgttctacaaaaatgcatcccgagagcgctatttttctaacaaagcatcttagattactttttttctcctttgtgcgctctataatgcagtctcttgataactttttgcactgtaggtccgttaaggttagaagaaggctactttggtgtctattttctcttccataaaaaaagcctgactccacttcccgcgtttactgattactagcgaagctgcgggtgcattttttcaagataaaggcatccccgattatattctataccgatgtggattgcgcatactttgtgaacagaaagtgatagcgttgatgattcttcattggtcagaaaattatgaacggtttcttctattttgtctctatatactacgtataggaaatgtttacattttcgtattgttttcgattcactctatgaatagttcttactacaatttttttgtctaaagagtaatactagagataaacataaaaaatgtagaggtcgagtttagatgcaagttcaaggagcgaaaggtggatgggtaggttatatagggatatagcacagagatatatagcaaagagatacttttgagcaatgtttgtggaagcggtattcgcaatattttagtagctcgttacagtccggtgcgtttttggttttttgaaagtgcgtcttcagagcgcttttggttttcaaaagcgctctgaagttcctatactttctagagaataggaacttcggaataggaacttcaaagcgtttccgaaaacgagcgcttccgaaaatgcaacgcgagctgcgcacatacagctcactgttcacgtcgcacctatatctgcgtgttgcctgtatatatatatacatgagaagaacggcatagtgcgtgtttatgcttaaatgcgtacttatatgcgtctatttatgtaggatgaaaggtagtctagtacctcctgtgatattatcccattccatgcggggtatcgtatgcttccttcagcactaccctttagctgttctatatgctgccactcctcaattggattagtctcatccttcaatgctatcatttcctttgatattggatcatatgcatagtaccgagaaactagtgcgaagtagtgatcaggtattgctgttatctgatgagtatacgttgtcctggccacggcagaagcacgcttatcgctccaatttcccacaacattagtcaactccgttaggcccttcattgaaagaaatgaggtcatcaaatgtcttccaatgtgagattttgggccattttttatagcaaagattgaataaggcgcatttttcttcaaagctttattgtacgatctgactaagttatcttttaataattggtattcctgtttattgcttgaagaattgccggtcctatttactcgttttaggactggttcagaattcatcgatgctcactcaaaggtcggtaatacggttatccacagaatcaggggataacgcaggaaagaac

SEQ ID NO: 242 - DNA, 6262 bp, Artificial sequence
  pCLS9922
atgtgagcaaaaggccagcaaaaggccaggaaccgtaaaaaggccgcgttgctggcgtttttccataggctccgcccccctgacgagcatcacaaaaatcgacgctcaagtcagaggtggcgaaacccgacaggactataaagataccaggcgtttccccctggaagctccctcgtgcgctctcctgttccgaccctgccgcttaccggatacctgtccgcctttctcccttcgggaagcgtggcgctttctcatagctcacgctgtaggtatctcagttcggtgtaggtcgttcgctccaagctgggctgtgtgcacgaaccccccgttcagcccgaccgctgcgccttatccggtaactatcgtcttgagtccaacccggtaagacacgacttatcgccactggcagcagccactggtaacaggattagcagagcgaggtatgtaggcggtgctacagagttcttgaagtggtggcctaactacggctacactagaaggacagtatttggtatctgcgctctgctgaagccagttaccttcggaaaaagagttggtagctcttgatccggcaaacaaaccaccgctggtagcggtggtttttttgtttgcaagcagcagattacgcgcagaaaaaaaggatctcaagaagatcctttgatcttttctacggggtctgacgctcagtggaacgaaaactcacgttaagggattttggtcatgagcggatacatatttgaatgtatttagaaaaataaacaaataggggttccgcgcacatttccccgaaaagtgccacctgacgtccgatcaaaaatcatcgcttcgctgattaattaccccagaaataaggctaaaaaactaatcgcattatcatcctatggttgttaatttgattcgttcatttgaaggtttgtggggccaggttactgccaatttttcctcttcataaccataaaagctagtattgtagaatctttattgttcggagcagtgcggcgcgaggcacatctgcgtttcaggaacgcgaccggtgaagacgaggacgcacggaggagagtcttccttcggagggctgtcacccgctcggcggcttctaatccgtacttcaatatagcaatgagcagttaagcgtattactgaaagttccaaagagaaggtttttttaggctaatcgacctcgagcagatccgccaggcgtgtatatagcgtggatggccaggcaactttagtgctgacacatacaggcatatatatatgtgtgcgacgacacatgatcatatggcatgcatgtgctctgtatgtatataaaactcttgttttcttcttttctctaaatattctttccttatacattaggtcctttgtagcataaattactatacttctatagacacgcaaacacaaatacacagcggccttgccaccatgggatccgaactgaagaactccatcagcgattacaccgaagccgagttcgtgcagctgttgaaagaaattgagaaagagaacgttgctgccaccgatgacgtgctggatgttttgctggaacattttgtgaagatcactgaacatccagatggcactgacctgatctactacccgagcgataaccgtgatgacagcccagaaggcattgttaaagagatcaaagaatggagagctgccaacggcaagccaggcttcaaacagggttgacggccgactgataactcgagcgatcctctagacgagctcctcgagcctgcagcagctgaagctttggacttcttcgccagaggtttggtcaagtctccaatcaaggttgtcggcttgtctaccttgccagaaatttacgaaaagatggaaaagggtcaaatcgttggtagatacgttgttgacacttctaaataagcgaatttcttatgatttatgatttttattattaaataagttataaaaaaaataagtgtatacaaattttaaagtgactcttaggttttaaaacgaaaattcttattcttgagtaactctttcctgtaggtcaggttgctttctcaggtatagcatgaggtcgctcttattgaccacacctctaccggcatgcaagcttggcgtaatcatggtcatagctgtttcctgtgtgaaattgttatccgctcacaattccacacaacatacgagccggaagcataaagtgtaaagcctggggtgcctaatgagtgagctaactcacattaattgcgttgcgctcactgcccgctttccagtcgggaaacctgtcgtgccagcagatctgtttagcttgcctcgtccccgccgggtcacccggccagcgacatggaggcccagaataccctccttgacagtcttgacgtgcgcagctcaggggcatgatgtgactgtcgcccgtacatttagcccatacatccccatgtataatcatttgcatccatacattttgatggccgcacggcgcgaagcaaaaattacggctcctcgctgcagacctgcgagcagggaaacgctcccctcacagacgcgttgaattgtccccacgccgcgcccctgtagagaaatataaaaggttaggatttgccactgaggttcttctttcatatacttccttttaaaatcttgctaggatacagttctcacatcacatccgaacataaacaaccatgcatgggtaaggaaaagactcacgtttcgaggccgcgattaaattccaacatggatgctgatttatatgggtataaatgggctcgcgataatgtcgggcaatcaggtgcgacaatctatcgattgtatgggaagcccgatgcgccagagttgtttctgaaacatggcaaaggtagcgttgccaatgatgttacagatgagatggtcagactaaactggctgacggaatttatgcctcttccgaccatcaagcattttatccgtactcctgatgatgcatggttactcaccactgcgatccccggcaaaacagcattccaggtattagaagaatatcctgattcaggtgaaaatattgttgatgcgctggcagtgttcctgcgccggttgcattcgattcctgtttgtaattgtccttttaacagcgatcgcgtatttcgcctcgctcaggcgcaatcacgaatgaataacggtttggttgatgcgagtgattttgatgacgagcgtaatggctggcctgttgaacaagtctggaaagaaatgcataagcttttgccattctcaccggattcagtcgtcactcatggtgatttctcacttgataaccttatttttgacgaggggaaattaataggttgtattgatgttggacgagtcggaatcgcagaccgataccaggatcttgccatcctatggaactgcctcggtgagttttctccttcattacagaaacggctttttcaaaaatatggtattgataatcctgatatgaataaattgcagtttcatttgatgctcgatgagtttttctaatcagtactgacaataaaaagattcttgttttcaagaacttgtcatttgtatagtttttttatattgtagttgttctattttaatcaaatgttagcgtgatttatattttttttcgcctcgacatcatctgcccagatgcgaagttaagtgcgcagaaagtaatatcatgcgtcaatcgtatgtgaatgctggtcgctatactgctgtcgattcgatactaacgccgccatccagtgtcgaaaacgagctcgaattcatcgatgatatcagatccactagtggcctatgcgaccgcggatctgccggtctccctatagtgagtcgtattaatttcgataagccaggttaacctgcattaatgaatcggccaacgcgcggggagaggcggtttgcgtattgggcgctcttccgcttcctcgctcactgactcgctgcgctcggtcgttcggctgcggcgagcggtatcagcatcgatgaattccacggactatagactatactagtatactccgtctactgtacgatacacttccgctcaggtccttgtcctttaacgaggccttaccactcttttgttactctattgatccagctcagcaaaggcagtgtgatctaagattctatcttcgcgatgtagtaaaactagctagaccgagaaagagactagaaatgcaaaaggcacttctacaatggctgccatcattattatccgatgtgacgctgcagcttctcaatgatattcgaatacgctttgaggagatacagcctaatatccgacaaactgttttacagatttacgatcgtacttgttacccatcattgaattttgaacatccgaacctgggagttttccctgaaacagatagtatatttgaacctgtataataatatatagtctagcgctttacggaagacaatgtatgtatttcggttcctggagaaactattgcatctattgcataggtaatcttgcacgtcgcatccccggttcattttctgcgtttccatcttgcacttcaatagcatatctttgttaacgaagcatctgtgcttcattttgtagaacaaaaatgcaacgcgagagcgctaatttttcaaacaaagaatctgagctgcatttttacagaacagaaatgcaacgcgaaagcgctattttaccaacgaagaatctgtgcttcatttttgtaaaacaaaaatgcaacgcgagagcgctaatttttcaaacaaagaatctgagctgcatttttacagaacagaaatgcaacgcgagagcgctattttaccaacaaagaatctatacttcttttttgttctacaaaaatgcatcccgagagcgctatttttctaacaaagcatcttagattactttttttctcctttgtgcgctctataatgcagtctcttgataactttttgcactgtaggtccgttaaggttagaagaaggctactttggtgtctattttctcttccataaaaaaagcctgactccacttcccgcgtttactgattactagcgaagctgcgggtgcattttttcaagataaaggcatccccgattatattctataccgatgtggattgcgcatactttgtgaacagaaagtgatagcgttgatgattcttcattggtcagaaaattatgaacggtttcttctattttgtctctatatactacgtataggaaatgtttacattttcgtattgttttcgattcactctatgaatagttcttactacaatttttttgtctaaagagtaatactagagataaacataaaaaatgtagaggtcgagtttagatgcaagttcaaggagcgaaaggtggatgggtaggttatatagggatatagcacagagatatatagcaaagagatacttttgagcaatgtttgtggaagcggtattcgcaatattttagtagctcgttacagtccggtgcgtttttggttttttgaaagtgcgtcttcagagcgcttttggttttcaaaagcgctctgaagttcctatactttctagagaataggaacttcggaataggaacttcaaagcgtttccgaaaacgagcgcttccgaaaatgcaacgcgagctgcgcacatacagctcactgttcacgtcgcacctatatctgcgtgttgcctgtatatatatatacatgagaagaacggcatagtgcgtgtttatgcttaaatgcgtacttatatgcgtctatttatgtaggatgaaaggtagtctagtacctcctgtgatattatcccattccatgcggggtatcgtatgcttccttcagcactaccctttagctgttctatatgctgccactcctcaattggattagtctcatccttcaatgctatcatttcctttgatattggatcatatgcatagtaccgagaaactagtgcgaagtagtgatcaggtattgctgttatctgatgagtatacgttgtcctggccacggcagaagcacgcttatcgctccaatttcccacaacattagtcaactccgttaggcccttcattgaaagaaatgaggtcatcaaatgtcttccaatgtgagattttgggccattttttatagcaaagattgaataaggcgcatttttcttcaaagctttattgtacgatctgactaagttatcttttaataattggtattcctgtttattgcttgaagaattgccggtcctatttactcgttttaggactggttcagaattcatcgatgctcactcaaaggtcggtaatacggttatccacagaatcaggggataacgcaggaaagaac

SEQ ID NO: 243 - DNA, 6406 bp, Artificial sequence
  pCLS9923
atgtgagcaaaaggccagcaaaaggccaggaaccgtaaaaaggccgcgttgctggcgtttttccataggctccgcccccctgacgagcatcacaaaaatcgacgctcaagtcagaggtggcgaaacccgacaggactataaagataccaggcgtttccccctggaagctccctcgtgcgctctcctgttccgaccctgccgcttaccggatacctgtccgcctttctcccttcgggaagcgtggcgctttctcatagctcacgctgtaggtatctcagttcggtgtaggtcgttcgctccaagctgggctgtgtgcacgaaccccccgttcagcccgaccgctgcgccttatccggtaactatcgtcttgagtccaacccggtaagacacgacttatcgccactggcagcagccactggtaacaggattagcagagcgaggtatgtaggcggtgctacagagttcttgaagtggtggcctaactacggctacactagaaggacagtatttggtatctgcgctctgctgaagccagttaccttcggaaaaagagttggtagctcttgatccggcaaacaaaccaccgctggtagcggtggtttttttgtttgcaagcagcagattacgcgcagaaaaaaaggatctcaagaagatcctttgatcttttctacggggtctgacgctcagtggaacgaaaactcacgttaagggattttggtcatgagcggatacatatttgaatgtatttagaaaaataaacaaataggggttccgcgcacatttccccgaaaagtgccacctgacgtccgatcaaaaatcatcgcttcgctgattaattaccccagaaataaggctaaaaaactaatcgcattatcatcctatggttgttaatttgattcgttcatttgaaggtttgtggggccaggttactgccaatttttcctcttcataaccataaaagctagtattgtagaatctttattgttcggagcagtgcggcgcgaggcacatctgcgtttcaggaacgcgaccggtgaagacgaggacgcacggaggagagtcttccttcggagggctgtcacccgctcggcggcttctaatccgtacttcaatatagcaatgagcagttaagcgtattactgaaagttccaaagagaaggtttttttaggctaatcgacctcgagcagatccgccaggcgtgtatatagcgtggatggccaggcaactttagtgctgacacatacaggcatatatatatgtgtgcgacgacacatgatcatatggcatgcatgtgctctgtatgtatataaaactcttgttttcttcttttctctaaatattctttccttatacattaggtcctttgtagcataaattactatacttctatagacacgcaaacacaaatacacagcggccttgccaccatgggatccaccaagaccaacagcgagattctggaacagctgaaacaggccagcgatggcttgctgttcatgtccgaaagcgagtacccgtttgaagtcttcttgtgggaaggttccgctccaccagtgacccatgagatcgtgttgcagcagactggtcatggccaggatgccccgttcaaagttgtggacatcgactccttctttagcagagccaccactccacaggattggtacgaagatgaagagaacgccgtggttgccaagtttcagaaactgctggaagtcatcaagtccaacctgaagaacccgcaggtgtacagattgggcgaagtcgaactggatgtgtacgtgattggcgagactccggctggcaacctggccggcatcagcaccaaagttgtggagacctgacggccgactgataactcgagcgatcctctagacgagctcctcgagcctgcagcagctgaagctttggacttcttcgccagaggtttggtcaagtctccaatcaaggttgtcggcttgtctaccttgccagaaatttacgaaaagatggaaaagggtcaaatcgttggtagatacgttgttgacacttctaaataagcgaatttcttatgatttatgatttttattattaaataagttataaaaaaaataagtgtatacaaattttaaagtgactcttaggttttaaaacgaaaattcttattcttgagtaactctttcctgtaggtcaggttgctttctcaggtatagcatgaggtcgctcttattgaccacacctctaccggcatgcaagcttggcgtaatcatggtcatagctgtttcctgtgtgaaattgttatccgctcacaattccacacaacatacgagccggaagcataaagtgtaaagcctggggtgcctaatgagtgagctaactcacattaattgcgttgcgctcactgcccgctttccagtcgggaaacctgtcgtgccagcagatctgtttagcttgcctcgtccccgccgggtcacccggccagcgacatggaggcccagaataccctccttgacagtcttgacgtgcgcagctcaggggcatgatgtgactgtcgcccgtacatttagcccatacatccccatgtataatcatttgcatccatacattttgatggccgcacggcgcgaagcaaaaattacggctcctcgctgcagacctgcgagcagggaaacgctcccctcacagacgcgttgaattgtccccacgccgcgcccctgtagagaaatataaaaggttaggatttgccactgaggttcttctttcatatacttccttttaaaatcttgctaggatacagttctcacatcacatccgaacataaacaaccatgcatgggtaaggaaaagactcacgtttcgaggccgcgattaaattccaacatggatgctgatttatatgggtataaatgggctcgcgataatgtcgggcaatcaggtgcgacaatctatcgattgtatgggaagcccgatgcgccagagttgtttctgaaacatggcaaaggtagcgttgccaatgatgttacagatgagatggtcagactaaactggctgacggaatttatgcctcttccgaccatcaagcattttatccgtactcctgatgatgcatggttactcaccactgcgatccccggcaaaacagcattccaggtattagaagaatatcctgattcaggtgaaaatattgttgatgcgctggcagtgttcctgcgccggttgcattcgattcctgtttgtaattgtccttttaacagcgatcgcgtatttcgcctcgctcaggcgcaatcacgaatgaataacggtttggttgatgcgagtgattttgatgacgagcgtaatggctggcctgttgaacaagtctggaaagaaatgcataagcttttgccattctcaccggattcagtcgtcactcatggtgatttctcacttgataaccttatttttgacgaggggaaattaataggttgtattgatgttggacgagtcggaatcgcagaccgataccaggatcttgccatcctatggaactgcctcggtgagttttctccttcattacagaaacggctttttcaaaaatatggtattgataatcctgatatgaataaattgcagtttcatttgatgctcgatgagtttttctaatcagtactgacaataaaaagattcttgttttcaagaacttgtcatttgtatagtttttttatattgtagttgttctattttaatcaaatgttagcgtgatttatattttttttcgcctcgacatcatctgcccagatgcgaagttaagtgcgcagaaagtaatatcatgcgtcaatcgtatgtgaatgctggtcgctatactgctgtcgattcgatactaacgccgccatccagtgtcgaaaacgagctcgaattcatcgatgatatcagatccactagtggcctatgcgaccgcggatctgccggtctccctatagtgagtcgtattaatttcgataagccaggttaacctgcattaatgaatcggccaacgcgcggggagaggcggtttgcgtattgggcgctcttccgcttcctcgctcactgactcgctgcgctcggtcgttcggctgcggcgagcggtatcagcatcgatgaattccacggactatagactatactagtatactccgtctactgtacgatacacttccgctcaggtccttgtcctttaacgaggccttaccactcttttgttactctattgatccagctcagcaaaggcagtgtgatctaagattctatcttcgcgatgtagtaaaactagctagaccgagaaagagactagaaatgcaaaaggcacttctacaatggctgccatcattattatccgatgtgacgctgcagcttctcaatgatattcgaatacgctttgaggagatacagcctaatatccgacaaactgttttacagatttacgatcgtacttgttacccatcattgaattttgaacatccgaacctgggagttttccctgaaacagatagtatatttgaacctgtataataatatatagtctagcgctttacggaagacaatgtatgtatttcggttcctggagaaactattgcatctattgcataggtaatcttgcacgtcgcatccccggttcattttctgcgtttccatcttgcacttcaatagcatatctttgttaacgaagcatctgtgcttcattttgtagaacaaaaatgcaacgcgagagcgctaatttttcaaacaaagaatctgagctgcatttttacagaacagaaatgcaacgcgaaagcgctattttaccaacgaagaatctgtgcttcatttttgtaaaacaaaaatgcaacgcgagagcgctaatttttcaaacaaagaatctgagctgcatttttacagaacagaaatgcaacgcgagagcgctattttaccaacaaagaatctatacttcttttttgttctacaaaaatgcatcccgagagcgctatttttctaacaaagcatcttagattactttttttctcctttgtgcgctctataatgcagtctcttgataactttttgcactgtaggtccgttaaggttagaagaaggctactttggtgtctattttctcttccataaaaaaagcctgactccacttcccgcgtttactgattactagcgaagctgcgggtgcattttttcaagataaaggcatccccgattatattctataccgatgtggattgcgcatactttgtgaacagaaagtgatagcgttgatgattcttcattggtcagaaaattatgaacggtttcttctattttgtctctatatactacgtataggaaatgtttacattttcgtattgttttcgattcactctatgaatagttcttactacaatttttttgtctaaagagtaatactagagataaacataaaaaatgtagaggtcgagtttagatgcaagttcaaggagcgaaaggtggatgggtaggttatatagggatatagcacagagatatatagcaaagagatacttttgagcaatgtttgtggaagcggtattcgcaatattttagtagctcgttacagtccggtgcgtttttggttttttgaaagtgcgtcttcagagcgcttttggttttcaaaagcgctctgaagttcctatactttctagagaataggaacttcggaataggaacttcaaagcgtttccgaaaacgagcgcttccgaaaatgcaacgcgagctgcgcacatacagctcactgttcacgtcgcacctatatctgcgtgttgcctgtatatatatatacatgagaagaacggcatagtgcgtgtttatgcttaaatgcgtacttatatgcgtctatttatgtaggatgaaaggtagtctagtacctcctgtgatattatcccattccatgcggggtatcgtatgcttccttcagcactaccctttagctgttctatatgctgccactcctcaattggattagtctcatccttcaatgctatcatttcctttgatattggatcatatgcatagtaccgagaaactagtgcgaagtagtgatcaggtattgctgttatctgatgagtatacgttgtcctggccacggcagaagcacgcttatcgctccaatttcccacaacattagtcaactccgttaggcccttcattgaaagaaatgaggtcatcaaatgtcttccaatgtgagattttgggccattttttatagcaaagattgaataaggcgcatttttcttcaaagctttattgtacgatctgactaagttatcttttaataattggtattcctgtttattgcttgaagaattgccggtcctatttactcgttttaggactggttcagaattcatcgatgctcactcaaaggtcggtaatacggttatccacagaatcaggggataacgcaggaaagaac

SEQ ID NO: 244 - DNA, 11175 bp, Artificial sequence
  pCLS8590
atgtgagcaaaaggccagcaaaaggccaggaaccgtaaaaaggccgcgttgctggcgtttttccataggctccgcccccctgacgagcatcacaaaaatcgacgctcaagtcagaggtggcgaaacccgacaggactataaagataccaggcgtttccccctggaagctccctcgtgcgctctcctgttccgaccctgccgcttaccggatacctgtccgcctttctcccttcgggaagcgtggcgctttctcatagctcacgctgtaggtatctcagttcggtgtaggtcgttcgctccaagctgggctgtgtgcacgaaccccccgttcagcccgaccgctgcgccttatccggtaactatcgtcttgagtccaacccggtaagacacgacttatcgccactggcagcagccactggtaacaggattagcagagcgaggtatgtaggcggtgctacagagttcttgaagtggtggcctaactacggctacactagaaggacagtatttggtatctgcgctctgctgaagccagttaccttcggaaaaagagttggtagctcttgatccggcaaacaaaccaccgctggtagcggtggtttttttgtttgcaagcagcagattacgcgcagaaaaaaaggatctcaagaagatcctttgatcttttctacggggtctgacgctcagtggaacgaaaactcacgttaagggattttggtcatgagattatcaaaaaggatcttcacctagatccttttaaattaaaaatgaagttttaaatcaatctaaagtatatatgagtaaacttggtctgacagttaccaatgcttaatcagtgaggcacctatctcagcgatctgtctatttcgttcatccatagttgcctgactccccgtcgtgtagataactacgatacgggagggcttaccatctggccccagtgctgcaatgataccgcgagacccacgctcaccggctccagatttatcagcaataaaccagccagccggaagggccgagcgcagaagtggtcctgcaactttatccgcctccatccagtctattaattgttgccgggaagctagagtaagtagttcgccagttaatagtttgcgcaacgttgttgccattgctacaggcatcgtggtgtcacgctcgtcgtttggtatggcttcattcagctccggttcccaacgatcaaggcgagttacatgatcccccatgttgtgcaaaaaagcggttagctccttcggtcctccgatcgttgtcagaagtaagttggccgcagtgttatcactcatggttatggcagcactgcataattctcttactgtcatgccatccgtaagatgcttttctgtgactggtgagtactcaaccaagtcattctgagaatagtgtatgcggcgaccgagttgctcttgcccggcgtcaatacgggataataccgcgccacatagcagaactttaaaagtgctcatcattggaaaacgttcttcggggcgaaaactctcaaggatcttaccgctgttgagatccagttcgatgtaacccactcgtgcacccaactgatcttcagcatcttttactttcaccagcgtttctgggtgagcaaaaacaggaaggcaaaatgccgcaaaaaagggaataagggcgacacggaaatgttgaatactcatactcttcctttttcaatattattgaagcatttatcagggttattgtctcatgagcggatacatatttgaatgtatttagaaaaataaacaaataggggttccgcgcacatttccccgaaaagtgccacctgacgtccgatcaaaaatcatcgcttcgctgattaattaccccagaaataaggctaaaaaactaatcgcattatcatcctatggttgttaatttgattcgttcatttgaaggtttgtggggccaggttactgccaatttttcctcttcataaccataaaagctagtattgtagaatctttattgttcggagcagtgcggcgcgaggcacatctgcgtttcaggaacgcgaccggtgaagacgaggacgcacggaggagagtcttccttcggagggctgtcacccgctcggcggcttctaatccgtacttcaatatagcaatgagcagttaagcgtattactgaaagttccaaagagaaggtttttttaggctaatcgacctcgagcagatccgccaggcgtgtatatagcgtggatggccaggcaactttagtgctgacacatacaggcatatatatatgtgtgcgacgacacatgatcatatggcatgcatgtgctctgtatgtatataaaactcttgttttcttcttttctctaaatattctttccttatacattaggtcctttgtagcataaattactatacttctatagacacgcaaacacaaatacacagcggccttgccaccatggtggatctacgcacgctcggctacagccagcagcaacaggagaagatcaaaccgaaggttcgttcgacagtggcgcagcaccacgaggcactggtcggccacgggtttacacacgcgcacatcgttgcgttaagccaacacccggcagcgttagggaccgtcgctgtcaagtatcaggacatgatcgcagcgttgccagaggcgacacacgaagcgatcgttggcgtcggcaaacagtggtccggcgcacgcgctctggaggccttgctcacggtggcgggagagttgagaggtccaccgttacagttggacacaggccaacttctcaagattgcaaaacgtggcggcgtgaccgcagtggaggcagtgcatgcatggcgcaatgcactgacgggtgccccgctcaacttgaccccggagcaggtggtggccatcgccagccacgatggcggcaagcaggcgctggagacggtccagcggctgttgccggtgctgtgccaggcccacggcttgaccccccagcaggtggtggccatcgccagcaatggcggtggcaagcaggcgctggagacggtccagcggctgttgccggtgctgtgccaggcccacggcttgaccccggagcaggtggtggccatcgccagcaatattggtggcaagcaggcgctggagacggtgcaggcgctgttgccggtgctgtgccaggcccacggcttgaccccccagcaggtggtggccatcgccagcaatggcggtggcaagcaggcgctggagacggtccagcggctgttgccggtgctgtgccaggcccacggcttgaccccggagcaggtggtggccatcgccagcaatattggtggcaagcaggcgctggagacggtgcaggcgctgttgccggtgctgtgccaggcccacggcttgaccccggagcaggtggtggccatcgccagcaatattggtggcaagcaggcgctggagacggtgcaggcgctgttgccggtgctgtgccaggcccacggcttgaccccggagcaggtggtggccatcgccagcaatattggtggcaagcaggcgctggagacggtgcaggcgctgttgccggtgctgtgccaggcccacggcttgaccccggagcaggtggtggccatcgccagccacgatggcggcaagcaggcgctggagacggtccagcggctgttgccggtgctgtgccaggcccacggcttgaccccggagcaggtggtggccatcgccagccacgatggcggcaagcaggcgctggagacggtccagcggctgttgccggtgctgtgccaggcccacggcttgaccccccagcaggtggtggccatcgccagcaatggcggtggcaagcaggcgctggagacggtccagcggctgttgccggtgctgtgccaggcccacggcttgaccccggagcaggtggtggccatcgccagcaatattggtggcaagcaggcgctggagacggtgcaggcgctgttgccggtgctgtgccaggcccacggcttgaccccggagcaggtggtggccatcgccagcaatattggtggcaagcaggcgctggagacggtgcaggcgctgttgccggtgctgtgccaggcccacggcttgaccccggagcaggtggtggccatcgccagccacgatggcggcaagcaggcgctggagacggtccagcggctgttgccggtgctgtgccaggcccacggcttgaccccggagcaggtggtggccatcgccagccacgatggcggcaagcaggcgctggagacggtccagcggctgttgccggtgctgtgccaggcccacggcttgaccccggagcaggtggtggccatcgccagccacgatggcggcaagcaggcgctggagacggtccagcggctgttgccggtgctgtgccaggcccacggcttgaccccccagcaggtggtggccatcgccagcaatggcggtggcaagcaggcgctggagacggtccagcggctgttgccggtgctgtgccaggcccacggcttgaccccggagcaggtggtggccatcgccagccacgatggcggcaagcaggcgctggagacggtccagcggctgttgccggtgctgtgccaggcccacggcttgacccctcagcaggtggtggccatcgccagcaatggcggcggcaggccggcgctggagagcattgttgcccagttatctcgccctgatccgggatcctccggaccgaacagaggcgttaccaagcaactagttaaatccgaactggaagagaaaaagtccgagttgcgtcataaactgaagtacgttccacatgaatacattgaactgatcgagattgcccgtaacagcacccaggacagaatcctggaaatgaaagtgatggagtttttcatgaaagtgtacggctacagaggcaaacatttgggcggtagccgtaaaccggatggtgccatctacaccgttggcagcccgatcgattacggcgtgatcgttgataccaaagcctactccggtggctacaacctgccgattggccaggctgacgaaatgcagagatacgtggaagagaaccagactcgtaacaagcatatcaacccgaacgaatggtggaaagtctacccgagttccgtgactgagttcaaatttctgtttgtgagcggccatttcaaaggcaactacaaagcccagctgaccagactgaaccatatcaccaactgcaacggtgccgtcttgagcgtggaagaactgttgattggtggcgaaatgatcaaggctggcaccctgactctggaggaagttagacgtaaattcaacaacggtgaaatcaactttggatcctcggccgactgataactcgagcgatcctctagacgagctcctcgagcctgcagcagctgaagctttggacttcttcgccagaggtttggtcaagtctccaatcaaggttgtcggcttgtctaccttgccagaaatttacgaaaagatggaaaagggtcaaatcgttggtagatacgttgttgacacttctaaataagcgaatttcttatgatttatgatttttattattaaataagttataaaaaaaataagtgtatacaaattttaaagtgactcttaggttttaaaacgaaaattcttattcttgagtaactctttcctgtaggtcaggttgctttctcaggtatagcatgaggtcgctcttattgaccacacctctaccggcatgcaagcttggcgtaatcatggtcatagctgtttcctgtgtgaaattgttatccgctcacaattccacacaacatacgagccggaagcataaagtgtaaagcctggggtgcctaatgagtgagctaactcacattaattgcgttgcgctcactgcccgctttccagtcgggaaacctgtcgtgccagcagatctattacattatgggtggtatgttggaataaaaatcaactatcatctactaactagtatttacgttactagtatattatcatatacggtgttagaagatgacgcaaatgatgagaaatagtcatctaaattagtggaagctgaaacgcaaggattgataatgtaataggatcaatgaatattaacatataaaatgatgataataatatttatagaattgtgtagaattgcagattcccttttatggattcctaaatcctcgaggagaacttctagtatatctacatacctaatattattgccttattaaaaatggaatcccaacaattacatcaaaatccacattctcttcaaaatcaattgtcctgtacttccttgttcatgtgtgttcaaaaacgttatatttataggataattatactctatttctcaacaagtaattggttgtttggccgagcggtctaaggcgcctgattcaagaaatatcttgaccgcagttaactgtgggaatactcaggtatcgtaagatgcaagagttcgaatctcttagcaaccattatttttttcctcaacataacgagaacacacaggggcgctatcgcacagaatcaaattcgatgactggaaattttttgttaatttcagaggtcgcctgacgcatatacctttttcaactgaaaaattgggagaaaaaggaaaggtgagagccgcggaaccggcttttcatatagaatagagaagcgttcatgactaaatgcttgcatcacaatacttgaagttgacaatattatttaaggacctattgttttttccaataggtggttagcaatcgtcttactttctaacttttcttaccttttacatttcagcaatatatatatatatatttcaaggatataccattctaatgtctgcccctaagaagatcgtcgttttgccaggtgaccacgttggtcaagaaatcacagccgaagccattaaggttcttaaagctatttctgatgttcgttccaatgtcaagttcgatttcgaaaatcatttaattggtggtgctgctatcgatgctacaggtgtcccacttccagatgaggcgctggaagcctccaagaaggttgatgccgttttgttaggtgctgtgggtggtcctaaatggggtaccggtagtgttagacctgaacaaggtttactaaaaatccgtaaagaacttcaattgtacgccaacttaagaccatgtaactttgcatccgactctcttttagacttatctccaatcaagccacaatttgctaaaggtactgacttcgttgttgtcagagaattagtgggaggtatttactttggtaagagaaaggaagacgatggtgatggtgtcgcttgggatagtgaacaatacaccgttccagaagtgcaaagaatcacaagaatggccgctttcatggccctacaacatgagccaccattgcctatttggtccttggataaagctaatgttttggcctcttcaagattatggagaaaaactgtggaggaaaccatcaagaacgaattccctacattgaaggttcaacatcaattgattgattctgccgccatgatcctagttaagaacccaacccacctaaatggtattataatcaccagcaacatgtttggtgatatcatctccgatgaagcctccgttatcccaggttccttgggtttgttgccatctgcgtccttggcctctttgccagacaagaacaccgcatttggtttgtacgaaccatgccacggttctgctccagatttgccaaagaataaggtcaaccctatcgccactatcttgtctgctgcaatgatgttgaaattgtcattgaacttgcctgaagaaggtaaggccattgaagatgcagttaaaaaggttttggatgcaggtatcagaactggtgatttaggtggttccaacagtaccacggaagtcggtgatgctgtcgccgaagaagttaagaaaatccttgcttaaaaagattctctttttttatgatatttgtacataaactttataaatgaaattcataatagaaacgacacgaaattacaaaatggaatatgttcatagggtagacgaaactatatacgcaatctacatacatttatcaagaaggagaaaaaggaggatgtaaaggaatacaggtaagcaaattgatactaatggctcaacgtgataaggaaaaagaattgcactttaacattaatattgacaaggaggagggcaccacacaaaaagttaggtgtaacagaaaatcatgaaactatgattcctaatttatatattggaggattttctctaaaaaaaaaaaaatacaacaaataaaaaacactcaatgacctgaccatttgatggagtttaagtcaataccttcttgaaccatttcccataatggtgaaagttccctcaagaattttactctgtcagaaacggccttaacgacgtagtcgacctcctcttcagtactaaatctaccaataccaaatctgatggaagaatgggctaatgcatcatccttacccagcgcatgtaaaacataagaaggttctagggaagcagatgtacaggctgaacccgaggataatgcgatatcccttagtgccatcaataaagattctccttccacgtaggcgaaagaaacgttaacacaccctggataacgatgatctggagatccgttcaacgtggtatgttcagcggataatagacctttgactaatttatcggatagtcttttgatgtgagcttggtcgttgtcaaattctttcttcatcaatctcgcagcttcaccaaatcccgctaccaatgggggggccaaagtaccagatctgctgcattaatgaatcggccaacgcgcggggagaggcggtttgcgtattgggcgctcttccgcttcctcgctcactgactcgctgcgctcggtcgttcggctgcggcgagcggtatcagcatcgatgaattccacggactatagactatactagtatactccgtctactgtacgatacacttccgctcaggtccttgtcctttaacgaggccttaccactcttttgttactctattgatccagctcagcaaaggcagtgtgatctaagattctatcttcgcgatgtagtaaaactagctagaccgagaaagagactagaaatgcaaaaggcacttctacaatggctgccatcattattatccgatgtgacgctgcagcttctcaatgatattcgaatacgctttgaggagatacagcctaatatccgacaaactgttttacagatttacgatcgtacttgttacccatcattgaattttgaacatccgaacctgggagttttccctgaaacagatagtatatttgaacctgtataataatatatagtctagcgctttacggaagacaatgtatgtatttcggttcctggagaaactattgcatctattgcataggtaatcttgcacgtcgcatccccggttcattttctgcgtttccatcttgcacttcaatagcatatctttgttaacgaagcatctgtgcttcattttgtagaacaaaaatgcaacgcgagagcgctaatttttcaaacaaagaatctgagctgcatttttacagaacagaaatgcaacgcgaaagcgctattttaccaacgaagaatctgtgcttcatttttgtaaaacaaaaatgcaacgcgagagcgctaatttttcaaacaaagaatctgagctgcatttttacagaacagaaatgcaacgcgagagcgctattttaccaacaaagaatctatacttcttttttgttctacaaaaatgcatcccgagagcgctatttttctaacaaagcatcttagattactttttttctcctttgtgcgctctataatgcagtctcttgataactttttgcactgtaggtccgttaaggttagaagaaggctactttggtgtctattttctcttccataaaaaaagcctgactccacttcccgcgtttactgattactagcgaagctgcgggtgcattttttcaagataaaggcatccccgattatattctataccgatgtggattgcgcatactttgtgaacagaaagtgatagcgttgatgattcttcattggtcagaaaattatgaacggtttcttctattttgtctctatatactacgtataggaaatgtttacattttcgtattgttttcgattcactctatgaatagttcttactacaatttttttgtctaaagagtaatactagagataaacataaaaaatgtagaggtcgagtttagatgcaagttcaaggagcgaaaggtggatgggtaggttatatagggatatagcacagagatatatagcaaagagatacttttgagcaatgtttgtggaagcggtattcgcaatattttagtagctcgttacagtccggtgcgtttttggttttttgaaagtgcgtcttcagagcgcttttggttttcaaaagcgctctgaagttcctatactttctagagaataggaacttcggaataggaacttcaaagcgtttccgaaaacgagcgcttccgaaaatgcaacgcgagctgcgcacatacagctcactgttcacgtcgcacctatatctgcgtgttgcctgtatatatatatacatgagaagaacggcatagtgcgtgtttatgcttaaatgcgtacttatatgcgtctatttatgtaggatgaaaggtagtctagtacctcctgtgatattatcccattccatgcggggtatcgtatgcttccttcagcactaccctttagctgttctatatgctgccactcctcaattggattagtctcatccttcaatgctatcatttcctttgatattggatcatatgcatagtaccgagaaactagtgcgaagtagtgatcaggtattgctgttatctgatgagtatacgttgtcctggccacggcagaagcacgcttatcgctccaatttcccacaacattagtcaactccgttaggcccttcattgaaagaaatgaggtcatcaaatgtcttccaatgtgagattttgggccattttttatagcaaagattgaataaggcgcatttttcttcaaagctttattgtacgatctgactaagttatcttttaataattggtattcctgtttattgcttgaagaattgccggtcctatttactcgttttaggactggttcagaattcatcgatgctcactcaaaggtcggtaatacggttatccacagaatcaggggataacgcaggaaagaac

SEQ ID NO: 245 - DNA, 17 bp, Artificial sequence
  RagT2-R target
tgtttatggttacttat

SEQ ID NO: 246 - DNA, 17 bp, Artificial sequence
  NptIIT5-L target
tccttgcgcagctgtgc

SEQ ID NO: 247 - DNA, 17 bp, Artificial sequence
  NptIIT5-R target
tagcagccagtcccttc

SEQ ID NO: 248 - DNA, 17 bp, Artificial sequence
  NptIIT6-L target
tgaagcgggaagggact

SEQ ID NO: 249 - DNA, 17 bp, Artificial sequence
  NptIIT6-R target
tgacaggagatcctgcc

SEQ ID NO: 250 - DNA, 49 bp, Artificial sequence
  RagT2.1 target
tatatttaagcacttatatgtgtgtaacaggtataagtaaccataaaca

SEQ ID NO: 251 - DNA, 55 bp, Artificial sequence
  NptIIT5.1 target
tccttgcgcagctgtgctcgacgttgtcactgaagcgggaagggactggctgcta

SEQ ID NO: 252 - DNA, 58 bp, Artificial sequence
  NptIIT6.1 target
tgaagcgggaagggactggctgctattgggcgaagtgccggggcaggatctcctgtca

SEQ ID NO: 253 - protein, 530 aa, Artificial sequence
  RagT2-R RVD insert
LTPQQVVAIASNNGGKQALETVQRLLPVLCQAHGLTPQQVVAIASNGGGKQALETVQRLLPVLCQAHGLTPQQVVAIASNGGGKQALETVQRLLPVLCQAHGLTPQQVVAIASNGGGKQALETVQRLLPVLCQAHGLTPEQVVAIASNIGGKQALETVQALLPVLCQAHGLTPQQVVAIASNGGGKQALETVQRLLPVLCQAHGLTPQQVVAIASNNGGKQALETVQRLLPVLCQAHGLTPQQVVAIASNNGGKQALETVQRLLPVLCQAHGLTPQQVVAIASNGGGKQALETVQRLLPVLCQAHGLTPQQVVAIASNGGGKQALETVQRLLPVLCQAHGLTPEQVVAIASNIGGKQALETVQALLPVLCQAHGLTPEQVVAIASHDGGKQALETVQRLLPVLCQAHGLTPQQVVAIASNGGGKQALETVQRLLPVLCQAHGLTPQQVVAIASNGGGKQALETVQRLLPVLCQAHGLTPEQVVAIASNIGGKQALETVQALLPVLCQAHGLTPQQVVAIASNGGGRPALE

SEQ ID NO: 254 - protein, 530 aa, Artificial sequence
  NptIIT5-L RVD insert
LTPEQVVAIASHDGGKQALETVQRLLPVLCQAHGLTPEQVVAIASHDGGKQALETVQRLLPVLCQAHGLTPQQVVAIASNGGGKQALETVQRLLPVLCQAHGLTPQQVVAIASNGGGKQALETVQRLLPVLCQAHGLTPQQVVAIASNNGGKQALETVQRLLPVLCQAHGLTPEQVVAIASHDGGKQALETVQRLLPVLCQAHGLTPQQVVAIASNNGGKQALETVQRLLPVLCQAHGLTPEQVVAIASHDGGKQALETVQRLLPVLCQAHGLTPEQVVAIASNIGGKQALETVQALLPVLCQAHGLTPQQVVAIASNNGGKQALETVQRLLPVLCQAHGLTPEQVVAIASHDGGKQALETVQRLLPVLCQAHGLTPQQVVAIASNGGGKQALETVQRLLPVLCQAHGLTPQQVVAIASNNGGKQALETVQRLLPVLCQAHGLTPQQVVAIASNGGGKQALETVQRLLPVLCQAHGLTPQQVVAIASNNGGKQALETVQRLLPVLCQAHGLTPQQVVAIASNGGGRPALE

SEQ ID NO: 255 - protein, 530 aa, Artificial sequence
  NptIIT5-R RVD insert
LTPEQVVAIASNIGGKQALETVQALLPVLCQAHGLTPQQVVAIASNNGGKQALETVQRLLPVLCQAHGLTPEQVVAIASHDGGKQALETVQRLLPVLCQAHGLTPEQVVAIASNIGGKQALETVQALLPVLCQAHGLTPQQVVAIASNNGGKQALETVQRLLPVLCQAHGLTPEQVVAIASHDGGKQALETVQRLLPVLCQAHGLTPEQVVAIASHDGGKQALETVQRLLPVLCQAHGLTPEQVVAIASNIGGKQALETVQALLPVLCQAHGLTPQQVVAIASNNGGKQALETVQRLLPVLCQAHGLTPQQVVAIASNGGGKQALETVQRLLPVLCQAHGLTPEQVVAIASHDGGKQALETVQRLLPVLCQAHGLTPEQVVAIASHDGGKQALETVQRLLPVLCQAHGLTPEQVVAIASHDGGKQALETVQRLLPVLCQAHGLTPQQVVAIASNGGGKQALETVQRLLPVLCQAHGLTPQQVVAIASNGGGKQALETVQRLLPVLCQAHGLTPQQVVAIASNGGGRPALE

SEQ ID NO: 256 - protein, 530 aa, Artificial sequence
  NptIIT6-L RVD insert
LTPQQVVAIASNNGGKQALETVQRLLPVLCQAHGLTPEQVVAIASNIGGKQALETVQALLPVLCQAHGLTPEQVVAIASNIGGKQALETVQALLPVLCQAHGLTPQQVVAIASNNGGKQALETVQRLLPVLCQAHGLTPEQVVAIASHDGGKQALETVQRLLPVLCQAHGLTPQQVVAIASNNGGKQALETVQRLLPVLCQAHGLTPQQVVAIASNNGGKQALETVQRLLPVLCQAHGLTPQQVVAIASNNGGKQALETVQRLLPVLCQAHGLTPEQVVAIASNIGGKQALETVQALLPVLCQAHGLTPEQVVAIASNIGGKQALETVQALLPVLCQAHGLTPQQVVAIASNNGGKQALETVQRLLPVLCQAHGLTPQQVVAIASNNGGKQALETVQRLLPVLCQAHGLTPQQVVAIASNNGGKQALETVQRLLPVLCQAHGLTPEQVVAIASNIGGKQALETVQALLPVLCQAHGLTPEQVVAIASHDGGKQALETVQRLLPVLCQAHGLTPQQVVAIASNGGGRPALE

SEQ ID NO: 257 - protein, 530 aa, Artificial sequence
  NptIIT6-R RVD insert
LTPQQVVAIASNNGGKQALETVQRLLPVLCQAHGLTPEQVVAIASNIGGKQALETVQALLPVLCQAHGLTPEQVVAIASHDGGKQALETVQRLLPVLCQAHGLTPEQVVAIASNIGGKQALETVQALLPVLCQAHGLTPQQVVAIASNNGGKQALETVQRLLPVLCQAHGLTPQQVVAIASNNGGKQALETVQRLLPVLCQAHGLTPEQVVAIASNIGGKQALETVQALLPVLCQAHGLTPQQVVAIASNNGGKQALETVQRLLPVLCQAHGLTPEQVVAIASNIGGKQALETVQALLPVLCQAHGLTPQQVVAIASNGGGKQALETVQRLLPVLCQAHGLTPEQVVAIASHDGGKQALETVQRLLPVLCQAHGLTPEQVVAIASHDGGKQALETVQRLLPVLCQAHGLTPQQVVAIASNGGGKQALETVQRLLPVLCQAHGLTPQQVVAIASNNGGKQALETVQRLLPVLCQAHGLTPEQVVAIASHDGGKQALETVQRLLPVLCQAHGLTPQQVVAIASNGGGRPALE

SEQ ID NO: 258 - DNA, 9183 bp, Artificial sequence
  TevCreD05 in pCLS6618
atgtgagcaaaaggccagcaaaaggccaggaaccgtaaaaaggccgcgttgctggcgtttttccataggctccgcccccctgacgagcatcacaaaaatcgacgctcaagtcagaggtggcgaaacccgacaggactataaagataccaggcgtttccccctggaagctccctcgtgcgctctcctgttccgaccctgccgcttaccggatacctgtccgcctttctcccttcgggaagcgtggcgctttctcatagctcacgctgtaggtatctcagttcggtgtaggtcgttcgctccaagctgggctgtgtgcacgaaccccccgttcagcccgaccgctgcgccttatccggtaactatcgtcttgagtccaacccggtaagacacgacttatcgccactggcagcagccactggtaacaggattagcagagcgaggtatgtaggcggtgctacagagttcttgaagtggtggcctaactacggctacactagaaggacagtatttggtatctgcgctctgctgaagccagttaccttcggaaaaagagttggtagctcttgatccggcaaacaaaccaccgctggtagcggtggtttttttgtttgcaagcagcagattacgcgcagaaaaaaaggatctcaagaagatcctttgatcttttctacggggtctgacgctcagtggaacgaaaactcacgttaagggattttggtcatgagattatcaaaaaggatcttcacctagatccttttaaattaaaaatgaagttttaaatcaatctaaagtatatatgagtaaacttggtctgacagttaccaatgcttaatcagtgaggcacctatctcagcgatctgtctatttcgttcatccatagttgcctgactccccgtcgtgtagataactacgatacgggagggcttaccatctggccccagtgctgcaatgataccgcgagacccacgctcaccggctccagatttatcagcaataaaccagccagccggaagggccgagcgcagaagtggtcctgcaactttatccgcctccatccagtctattaattgttgccgggaagctagagtaagtagttcgccagttaatagtttgcgcaacgttgttgccattgctacaggcatcgtggtgtcacgctcgtcgtttggtatggcttcattcagctccggttcccaacgatcaaggcgagttacatgatcccccatgttgtgcaaaaaagcggttagctccttcggtcctccgatcgttgtcagaagtaagttggccgcagtgttatcactcatggttatggcagcactgcataattctcttactgtcatgccatccgtaagatgcttttctgtgactggtgagtactcaaccaagtcattctgagaatagtgtatgcggcgaccgagttgctcttgcccggcgtcaatacgggataataccgcgccacatagcagaactttaaaagtgctcatcattggaaaacgttcttcggggcgaaaactctcaaggatcttaccgctgttgagatccagttcgatgtaacccactcgtgcacccaactgatcttcagcatcttttactttcaccagcgtttctgggtgagcaaaaacaggaaggcaaaatgccgcaaaaaagggaataagggcgacacggaaatgttgaatactcatactcttcctttttcaatattattgaagcatttatcagggttattgtctcatgagcggatacatatttgaatgtatttagaaaaataaacaaataggggttccgcgcacatttccccgaaaagtgccacctgacgtccgatcaaaaatcatcgcttcgctgattaattaccccagaaataaggctaaaaaactaatcgcattatcatcctatggttgttaatttgattcgttcatttgaaggtttgtggggccaggttactgccaatttttcctcttcataaccataaaagctagtattgtagaatctttattgttcggagcagtgcggcgcgaggcacatctgcgtttcaggaacgcgaccggtgaagacgaggacgcacggaggagagtcttccttcggagggctgtcacccgctcggcggcttctaatccgtacttcaatatagcaatgagcagttaagcgtattactgaaagttccaaagagaaggtttttttaggctaatcgacctcgagcagatccgccaggcgtgtatatagcgtggatggccaggcaactttagtgctgacacatacaggcatatatatatgtgtgcgacgacacatgatcatatggcatgcatgtgctctgtatgtatataaaactcttgttttcttcttttctctaaatattctttccttatacattaggtcctttgtagcataaattactatacttctatagacacgcaaacacaaatacacagcggccttgccaccatggccaagtctggcatctaccagattaagaacaccctgaataacaaagtgtatgttggatctgccaaggactttgagaaaagatggaagaggcacttcaaggatctggaaaagggttgccacagctccatcaagctccaaaggtctttcaacaaacatggcaatgtctttgagtgctccattttggaagagatcccttatgaaaaggacctcattatagagagggaaaacttctggatcaaggagctgaactcaaaaatcaatggatacaacattgcagatgccacatttggtgacacctgttctactcacccccttaaggaagagatcattaaaaagaggtctgagactgtgaaggctaagatgttgaaacaaggtccatctggcaataccaaatataacaaagagttcctgctgtacctggccggctttgtggacggtaacggtagcatcatcgctcagattaaaccaaaccagtcttataagtttaaacatcagctaagcttgacctttcaggtgactcaaaagacccagcgccgttggtttctggacaaactagtggatgaaattggcgttggttacgtacgtgatcgcggatccgtttccgattacattttaagcgaaatcaagccgctgcacaacttcctgactcaactgcagccgtttctgaaactgaaacagaaacaggcaaacctggttctgaaaattatcgaacagctgccgtctgcaaaagaatccccggacaaattcctggaagtttgtacctgggtggatcagattgcagctctgaacgattctaagacgcgtaaaaccacttctgaaaccgttcgtgctgtgctggacagcctgagcgagaagaagaaatcctccccggcggccgactgataactcgagcgatcctctagacgagctcctcgagcctgcagcagctgaagctttggacttcttcgccagaggtttggtcaagtctccaatcaaggttgtcggcttgtctaccttgccagaaatttacgaaaagatggaaaagggtcaaatcgttggtagatacgttgttgacacttctaaataagcgaatttcttatgatttatgatttttattattaaataagttataaaaaaaataagtgtatacaaattttaaagtgactcttaggttttaaaacgaaaattcttattcttgagtaactctttcctgtaggtcaggttgctttctcaggtatagcatgaggtcgctcttattgaccacacctctaccggcatgcaagcttggcgtaatcatggtcatagctgtttcctgtgtgaaattgttatccgctcacaattccacacaacatacgagccggaagcataaagtgtaaagcctggggtgcctaatgagtgagctaactcacattaattgcgttgcgctcactgcccgctttccagtcgggaaacctgtcgtgccagcagatctattacattatgggtggtatgttggaataaaaatcaactatcatctactaactagtatttacgttactagtatattatcatatacggtgttagaagatgacgcaaatgatgagaaatagtcatctaaattagtggaagctgaaacgcaaggattgataatgtaataggatcaatgaatattaacatataaaatgatgataataatatttatagaattgtgtagaattgcagattcccttttatggattcctaaatcctcgaggagaacttctagtatatctacatacctaatattattgccttattaaaaatggaatcccaacaattacatcaaaatccacattctcttcaaaatcaattgtcctgtacttccttgttcatgtgtgttcaaaaacgttatatttataggataattatactctatttctcaacaagtaattggttgtttggccgagcggtctaaggcgcctgattcaagaaatatcttgaccgcagttaactgtgggaatactcaggtatcgtaagatgcaagagttcgaatctcttagcaaccattatttttttcctcaacataacgagaacacacaggggcgctatcgcacagaatcaaattcgatgactggaaattttttgttaatttcagaggtcgcctgacgcatatacctttttcaactgaaaaattgggagaaaaaggaaaggtgagagccgcggaaccggcttttcatatagaatagagaagcgttcatgactaaatgcttgcatcacaatacttgaagttgacaatattatttaaggacctattgttttttccaataggtggttagcaatcgtcttactttctaacttttcttaccttttacatttcagcaatatatatatatatatttcaaggatataccattctaatgtctgcccctaagaagatcgtcgttttgccaggtgaccacgttggtcaagaaatcacagccgaagccattaaggttcttaaagctatttctgatgttcgttccaatgtcaagttcgatttcgaaaatcatttaattggtggtgctgctatcgatgctacaggtgtcccacttccagatgaggcgctggaagcctccaagaaggttgatgccgttttgttaggtgctgtgggtggtcctaaatggggtaccggtagtgttagacctgaacaaggtttactaaaaatccgtaaagaacttcaattgtacgccaacttaagaccatgtaactttgcatccgactctcttttagacttatctccaatcaagccacaatttgctaaaggtactgacttcgttgttgtcagagaattagtgggaggtatttactttggtaagagaaaggaagacgatggtgatggtgtcgcttgggatagtgaacaatacaccgttccagaagtgcaaagaatcacaagaatggccgctttcatggccctacaacatgagccaccattgcctatttggtccttggataaagctaatgttttggcctcttcaagattatggagaaaaactgtggaggaaaccatcaagaacgaattccctacattgaaggttcaacatcaattgattgattctgccgccatgatcctagttaagaacccaacccacctaaatggtattataatcaccagcaacatgtttggtgatatcatctccgatgaagcctccgttatcccaggttccttgggtttgttgccatctgcgtccttggcctctttgccagacaagaacaccgcatttggtttgtacgaaccatgccacggttctgctccagatttgccaaagaataaggtcaaccctatcgccactatcttgtctgctgcaatgatgttgaaattgtcattgaacttgcctgaagaaggtaaggccattgaagatgcagttaaaaaggttttggatgcaggtatcagaactggtgatttaggtggttccaacagtaccacggaagtcggtgatgctgtcgccgaagaagttaagaaaatccttgcttaaaaagattctctttttttatgatatttgtacataaactttataaatgaaattcataatagaaacgacacgaaattacaaaatggaatatgttcatagggtagacgaaactatatacgcaatctacatacatttatcaagaaggagaaaaaggaggatgtaaaggaatacaggtaagcaaattgatactaatggctcaacgtgataaggaaaaagaattgcactttaacattaatattgacaaggaggagggcaccacacaaaaagttaggtgtaacagaaaatcatgaaactatgattcctaatttatatattggaggattttctctaaaaaaaaaaaaatacaacaaataaaaaacactcaatgacctgaccatttgatggagtttaagtcaataccttcttgaaccatttcccataatggtgaaagttccctcaagaattttactctgtcagaaacggccttaacgacgtagtcgacctcctcttcagtactaaatctaccaataccaaatctgatggaagaatgggctaatgcatcatccttacccagcgcatgtaaaacataagaaggttctagggaagcagatgtacaggctgaacccgaggataatgcgatatcccttagtgccatcaataaagattctccttccacgtaggcgaaagaaacgttaacacaccctggataacgatgatctggagatccgttcaacgtggtatgttcagcggataatagacctttgactaatttatcggatagtcttttgatgtgagcttggtcgttgtcaaattctttcttcatcaatctcgcagcttcaccaaatcccgctaccaatgggggggccaaagtaccagatctgctgcattaatgaatcggccaacgcgcggggagaggcggtttgcgtattgggcgctcttccgcttcctcgctcactgactcgctgcgctcggtcgttcggctgcggcgagcggtatcagcatcgatgaattccacggactatagactatactagtatactccgtctactgtacgatacacttccgctcaggtccttgtcctttaacgaggccttaccactcttttgttactctattgatccagctcagcaaaggcagtgtgatctaagattctatcttcgcgatgtagtaaaactagctagaccgagaaagagactagaaatgcaaaaggcacttctacaatggctgccatcattattatccgatgtgacgctgcagcttctcaatgatattcgaatacgctttgaggagatacagcctaatatccgacaaactgttttacagatttacgatcgtacttgttacccatcattgaattttgaacatccgaacctgggagttttccctgaaacagatagtatatttgaacctgtataataatatatagtctagcgctttacggaagacaatgtatgtatttcggttcctggagaaactattgcatctattgcataggtaatcttgcacgtcgcatccccggttcattttctgcgtttccatcttgcacttcaatagcatatctttgttaacgaagcatctgtgcttcattttgtagaacaaaaatgcaacgcgagagcgctaatttttcaaacaaagaatctgagctgcatttttacagaacagaaatgcaacgcgaaagcgctattttaccaacgaagaatctgtgcttcatttttgtaaaacaaaaatgcaacgcgagagcgctaatttttcaaacaaagaatctgagctgcatttttacagaacagaaatgcaacgcgagagcgctattttaccaacaaagaatctatacttcttttttgttctacaaaaatgcatcccgagagcgctatttttctaacaaagcatcttagattactttttttctcctttgtgcgctctataatgcagtctcttgataactttttgcactgtaggtccgttaaggttagaagaaggctactttggtgtctattttctcttccataaaaaaagcctgactccacttcccgcgtttactgattactagcgaagctgcgggtgcattttttcaagataaaggcatccccgattatattctataccgatgtggattgcgcatactttgtgaacagaaagtgatagcgttgatgattcttcattggtcagaaaattatgaacggtttcttctattttgtctctatatactacgtataggaaatgtttacattttcgtattgttttcgattcactctatgaatagttcttactacaatttttttgtctaaagagtaatactagagataaacataaaaaatgtagaggtcgagtttagatgcaagttcaaggagcgaaaggtggatgggtaggttatatagggatatagcacagagatatatagcaaagagatacttttgagcaatgtttgtggaagcggtattcgcaatattttagtagctcgttacagtccggtgcgtttttggttttttgaaagtgcgtcttcagagcgcttttggttttcaaaagcgctctgaagttcctatactttctagagaataggaacttcggaataggaacttcaaagcgtttccgaaaacgagcgcttccgaaaatgcaacgcgagctgcgcacatacagctcactgttcacgtcgcacctatatctgcgtgttgcctgtatatatatatacatgagaagaacggcatagtgcgtgtttatgcttaaatgcgtacttatatgcgtctatttatgtaggatgaaaggtagtctagtacctcctgtgatattatcccattccatgcggggtatcgtatgcttccttcagcactaccctttagctgttctatatgctgccactcctcaattggattagtctcatccttcaatgctatcatttcctttgatattggatcatatgcatagtaccgagaaactagtgcgaagtagtgatcaggtattgctgttatctgatgagtatacgttgtcctggccacggcagaagcacgcttatcgctccaatttcccacaacattagtcaactccgttaggcccttcattgaaagaaatgaggtcatcaaatgtcttccaatgtgagattttgggccattttttatagcaaagattgaataaggcgcatttttcttcaaagctttattgtacgatctgactaagttatcttttaataattggtattcctgtttattgcttgaagaattgccggtcctatttactcgttttaggactggttcagaattcatcgatgctcactcaaaggtcggtaatacggttatccacagaatcaggggataacgcaggaaagaac

SEQ ID NO: 259 - DNA, 36 bp, Artificial sequence
  CMP_G115
tggtatcggccgatggaccttgtttcaacatcttag

SEQ ID NO: 260 - DNA, 3866 bp, Artificial sequence
  pCLS15775
ggtctttcctgcgttatcccctgattctgtggataaccgtattaccgcctttgagtgagctgataccgctcgccgcagccgaacgaccgagcgcagcgagtcagtgagcgaggaagcggagagcgcccaatacgcaaaccgcctctccccgcgcgttggccgattcattaatgcagctggcacgacaggtttcccgactggaaagcgggcagtgagcgcaacgcaattaatgtgagttagctcactcattaggcaccccaggctttacactttatgcttccggctcgtatgttgtgtggaattgtgagcggataacaatttcacacaggaaacagctatgaccatgattacgccaagcgcgtcaattaaccctcactaaagggaacaaaagctgttaattaagcgcgccacacgcaaacacaaatacacagcggccttgccaccatggtggatctacgcacgctcggctacagccagcagcaacaggagaagatcaaaccgaaggttcgttcgacagtggcgcagcaccacgaggcactggtcggccacgggtttacacacgcgcacatcgttgcgttaagccaacacccggcagcgttagggaccgtcgctgtcaagtatcaggacatgatcgcagcgttgccagaggcgacacacgaagcgatcgttggcgtcggcaaacagtggtccggcgcacgcgctctggaggccttgctcacggtggcgggagagttgagaggtccaccgttacagttggacacaggccaacttctcaagattgcaaaacgtggcggcgtgaccgcagtggaggcagtgcatgcatggcgcaatgcactgacgggtgccccgctcaacttgaccggagacgcccgggggatcaggtcacgtgcgtctcggagcattgttgcccagttatctcgccctgatccgggatccaagtctggcatctaccagattaagaacaccctgaataacaaagtgtatgttggatctgccaaggactttgagaaaagatggaagaggcacttcaaggatctggaaaagggttgccacagctccatcaagctccaaaggtctttcaacaaacatggcaatgtctttgagtgctccattttggaagagatcccttatgaaaaggacctcattatagagagggaaaacttctggatcaaggagctgaactcaaaaatcaatggatacaacattgcagatgccacatttggtgacacctgttctactcacccccttaaggaagagatcattaaaaagaggtctgagactgtgaaggctaagatgttgaaacaaggtccatcggccgactgataagtcgaccaccaccaccaccaccactgataagagctcctcgagcctgcagcagctgaagctttggacttctggcgcgcccaattcgccctatagtgagtcgtattacgtcgcgctcactggccgtcgttttacaacgtcgtgactgggaaaaccctggcgttacccaacttaatcgccttgcagcacatccccctttcgccagctggcgtaatagcgaagaggcccgcaccgaaacgcccttcccaacagttgcgcagcctgaatggcgaatgggagcgccctgtagcggcgcattaagcgcggcgggtgtggtggttacgcgcagcgtgaccgctacacttgccagcgccctagcgcccgctcctttcgctttcttcccttcctttctcgccacgttcgccggctttccccgtcaagctctaaatcgggggctccctttagggttccgatttagtgctttacggcacctcgaccccaaaaaacttgattagggtgatggttggcctgtagtgggccatagccctgatagacggtttttcgccctttgacgttggagtccacgttctttaatagtggactcttgttccaaactggaacaacactcaaccctatctcggtctattcttttgatttataagggattttgccgatttcggcctattggttaaaaaatgagctgatttaacaaaaatttaacgcgaattttaacaaaatattaacgcttacaatttaggtggcacttttcggggaaatgtgcgcggaacccctatttgtttatttttctaaatacattcaaatatgtatccgctcatgagacaataaccctgataaatgcttcaataatattgaaaaaggaagagtatgagtattcaacatttccgtgtcgcccttattcccttttttgcggcattttgccttcctgtttttgctcacccagaaacgctggtgaaagtaaaagatgctgaagatcagttgggtgcacgagtgggttacatcgaactggatctcaacagcggtaagatccttgagagttttcgccccgaagaacgttttccaatgatgagcacttttaaagttctgctatgtggcgcggtattatcccgtattgacgccgggcaagagcaactcggtcgccgcatacactattctcagaatgacttggttgagtactcaccagtcacagaaaagcatcttacggatggcatgacagtaagagaattatgcagtgctgccataaccatgagtgataacactgcggccaacttacttctgacaacgatcggaggaccgaaggagctaaccgcttttttgcacaacatgggggatcatgtaactcgccttgatcgttgggaaccggagctgaatgaagccataccaaacgacgagcgtgacaccacgatgcctgtagcaatggcaacaacgttgcgcaaactattaactggcgaactacttactctagcttcccggcaacaattaatagactggatggaggcggataaagttgcaggaccacttctgcgctcggcccttccggctggctggtttattgctgataaatctggagccggtgagcgtggttctcgcggtatcattgcagcactggggccagatggtaagccctcccgtatcgtagttatctacacgacggggagtcaggcaactatggatgaacgaaatagacagatcgctgagataggtgcctcactgattaagcattggtaactgtcagaccaagtttactcatatatactttagattgatttaaaacttcatttttaatttaaaaggatctaggtgaagatcctttttgataatctcatgaccaaaatcccttaacgtgagttttcgttccactgagcgtcagaccccgtagaaaagatcaaaggatcttcttgagatcctttttttctgcgcgtaatctgctgcttgcaaacaaaaaaaccaccgctaccagcggtggtttgtttgccggatcaagagctaccaactctttttccgaaggtaactggcttcagcagagcgcagataccaaatactgttcttctagtgtagccgtagttaggccaccacttcaagaactctgtagcaccgcctacatacctcgctctgctaatcctgttaccagtggctgctgccagtggcgataagtcgtgtcttaccgggttggactcaagacgatagttaccggataaggcgcagcggtcgggctgaacggggggttcgtgcacacagcccagcttggagcgaacgacctacaccgaactgagatacctacagcgtgagctatgagaaagcgccacgcttcccgaagggagaaaggcggacaggtatccggtaagcggcagggtcggaacaggagagcgcacgagggagcttccagggggaaacgcctggtatctttatagtcctgtcgggtttcgccacctctgacttgagcgtcgatttttgtgatgctcgtcaggggggcggagcctatggaaaaacgccagcaacgcggcctttttacggttcctggccttttgctggccttttgctcacat

SEQ ID NO: 261 - DNA, 5618 bp, Artificial sequence
  pCLS15776
ggtctttcctgcgttatcccctgattctgtggataaccgtattaccgcctttgagtgagctgataccgctcgccgcagccgaacgaccgagcgcagcgagtcagtgagcgaggaagcggagagcgcccaatacgcaaaccgcctctccccgcgcgttggccgattcattaatgcagctggcacgacaggtttcccgactggaaagcgggcagtgagcgcaacgcaattaatgtgagttagctcactcattaggcaccccaggctttacactttatgcttccggctcgtatgttgtgtggaattgtgagcggataacaatttcacacaggaaacagctatgaccatgattacgccaagcgcgtcaattaaccctcactaaagggaacaaaagctgttaattaagcgcgccacacgcaaacacaaatacacagcggccttgccaccatggtggatctacgcacgctcggctacagccagcagcaacaggagaagatcaaaccgaaggttcgttcgacagtggcgcagcaccacgaggcactggtcggccacgggtttacacacgcgcacatcgttgcgttaagccaacacccggcagcgttagggaccgtcgctgtcaagtatcaggacatgatcgcagcgttgccagaggcgacacacgaagcgatcgttggcgtcggcaaacagtggtccggcgcacgcgctctggaggccttgctcacggtggcgggagagttgagaggtccaccgttacagttggacacaggccaacttctcaagattgcaaaacgtggcggcgtgaccgcagtggaggcagtgcatgcatggcgcaatgcactgacgggtgccccgctcaacttgaccccggagcaggtggtggccatcgccagccacgatggcggcaagcaggcgctggagacggtccagcggctgttgccggtgctgtgccaggcccacggcttgaccccccagcaggtggtggccatcgccagcaatggcggtggcaagcaggcgctggagacggtccagcggctgttgccggtgctgtgccaggcccacggcttgaccccggagcaggtggtggccatcgccagcaatattggtggcaagcaggcgctggagacggtgcaggcgctgttgccggtgctgtgccaggcccacggcttgaccccccagcaggtggtggccatcgccagcaatggcggtggcaagcaggcgctggagacggtccagcggctgttgccggtgctgtgccaggcccacggcttgaccccggagcaggtggtggccatcgccagcaatattggtggcaagcaggcgctggagacggtgcaggcgctgttgccggtgctgtgccaggcccacggcttgaccccggagcaggtggtggccatcgccagcaatattggtggcaagcaggcgctggagacggtgcaggcgctgttgccggtgctgtgccaggcccacggcttgaccccggagcaggtggtggccatcgccagcaatattggtggcaagcaggcgctggagacggtgcaggcgctgttgccggtgctgtgccaggcccacggcttgaccccggagcaggtggtggccatcgccagccacgatggcggcaagcaggcgctggagacggtccagcggctgttgccggtgctgtgccaggcccacggcttgaccccggagcaggtggtggccatcgccagccacgatggcggcaagcaggcgctggagacggtccagcggctgttgccggtgctgtgccaggcccacggcttgaccccccagcaggtggtggccatcgccagcaatggcggtggcaagcaggcgctggagacggtccagcggctgttgccggtgctgtgccaggcccacggcttgaccccggagcaggtggtggccatcgccagcaatattggtggcaagcaggcgctggagacggtgcaggcgctgttgccggtgctgtgccaggcccacggcttgaccccggagcaggtggtggccatcgccagcaatattggtggcaagcaggcgctggagacggtgcaggcgctgttgccggtgctgtgccaggcccacggcttgaccccggagcaggtggtggccatcgccagccacgatggcggcaagcaggcgctggagacggtccagcggctgttgccggtgctgtgccaggcccacggcttgaccccggagcaggtggtggccatcgccagccacgatggcggcaagcaggcgctggagacggtccagcggctgttgccggtgctgtgccaggcccacggcttgaccccggagcaggtggtggccatcgccagccacgatggcggcaagcaggcgctggagacggtccagcggctgttgccggtgctgtgccaggcccacggcttgaccccccagcaggtggtggccatcgccagcaatggcggtggcaagcaggcgctggagacggtccagcggctgttgccggtgctgtgccaggcccacggcttgaccccggagcaggtggtggccatcgccagccacgatggcggcaagcaggcgctggagacggtccagcggctgttgccggtgctgtgccaggcccacggcttgacccctcagcaggtggtggccatcgccagcaatggcggcggcaggccggcgctggagagcattgttgcccagttatctcgccctgatccgggatccaagtctggcatctaccagattaagaacaccctgaataacaaagtgtatgttggatctgccaaggactttgagaaaagatggaagaggcacttcaaggatctggaaaagggttgccacagctccatcaagctccaaaggtctttcaacaaacatggcaatgtctttgagtgctccattttggaagagatcccttatgaaaaggacctcattatagagagggaaaacttctggatcaaggagctgaactcaaaaatcaatggatacaacattgcagatgccacatttggtgacacctgttctactcacccccttaaggaagagatcattaaaaagaggtctgagactgtgaaggctaagatgttgaaacaaggtccatcggccgactgataagtcgaccaccaccaccaccaccactgataagagctcctcgagcctgcagcagctgaagctttggacttctggcgcgcccaattcgccctatagtgagtcgtattacgtcgcgctcactggccgtcgttttacaacgtcgtgactgggaaaaccctggcgttacccaacttaatcgccttgcagcacatccccctttcgccagctggcgtaatagcgaagaggcccgcaccgaaacgcccttcccaacagttgcgcagcctgaatggcgaatgggagcgccctgtagcggcgcattaagcgcggcgggtgtggtggttacgcgcagcgtgaccgctacacttgccagcgccctagcgcccgctcctttcgctttcttcccttcctttctcgccacgttcgccggctttccccgtcaagctctaaatcgggggctccctttagggttccgatttagtgctttacggcacctcgaccccaaaaaacttgattagggtgatggttggcctgtagtgggccatagccctgatagacggtttttcgccctttgacgttggagtccacgttctttaatagtggactcttgttccaaactggaacaacactcaaccctatctcggtctattcttttgatttataagggattttgccgatttcggcctattggttaaaaaatgagctgatttaacaaaaatttaacgcgaattttaacaaaatattaacgcttacaatttaggtggcacttttcggggaaatgtgcgcggaacccctatttgtttatttttctaaatacattcaaatatgtatccgctcatgagacaataaccctgataaatgcttcaataatattgaaaaaggaagagtatgagtattcaacatttccgtgtcgcccttattcccttttttgcggcattttgccttcctgtttttgctcacccagaaacgctggtgaaagtaaaagatgctgaagatcagttgggtgcacgagtgggttacatcgaactggatctcaacagcggtaagatccttgagagttttcgccccgaagaacgttttccaatgatgagcacttttaaagttctgctatgtggcgcggtattatcccgtattgacgccgggcaagagcaactcggtcgccgcatacactattctcagaatgacttggttgagtactcaccagtcacagaaaagcatcttacggatggcatgacagtaagagaattatgcagtgctgccataaccatgagtgataacactgcggccaacttacttctgacaacgatcggaggaccgaaggagctaaccgcttttttgcacaacatgggggatcatgtaactcgccttgatcgttgggaaccggagctgaatgaagccataccaaacgacgagcgtgacaccacgatgcctgtagcaatggcaacaacgttgcgcaaactattaactggcgaactacttactctagcttcccggcaacaattaatagactggatggaggcggataaagttgcaggaccacttctgcgctcggcccttccggctggctggtttattgctgataaatctggagccggtgagcgtggttctcgcggtatcattgcagcactggggccagatggtaagccctcccgtatcgtagttatctacacgacggggagtcaggcaactatggatgaacgaaatagacagatcgctgagataggtgcctcactgattaagcattggtaactgtcagaccaagtttactcatatatactttagattgatttaaaacttcatttttaatttaaaaggatctaggtgaagatcctttttgataatctcatgaccaaaatcccttaacgtgagttttcgttccactgagcgtcagaccccgtagaaaagatcaaaggatcttcttgagatcctttttttctgcgcgtaatctgctgcttgcaaacaaaaaaaccaccgctaccagcggtggtttgtttgccggatcaagagctaccaactctttttccgaaggtaactggcttcagcagagcgcagataccaaatactgttcttctagtgtagccgtagttaggccaccacttcaagaactctgtagcaccgcctacatacctcgctctgctaatcctgttaccagtggctgctgccagtggcgataagtcgtgtcttaccgggttggactcaagacgatagttaccggataaggcgcagcggtcgggctgaacggggggttcgtgcacacagcccagcttggagcgaacgacctacaccgaactgagatacctacagcgtgagctatgagaaagcgccacgcttcccgaagggagaaaggcggacaggtatccggtaagcggcagggtcggaacaggagagcgcacgagggagcttccagggggaaacgcctggtatctttatagtcctgtcgggtttcgccacctctgacttgagcgtcgatttttgtgatgctcgtcaggggggcggagcctatggaaaaacgccagcaacgcggcctttttacggttcctggccttttgctggccttttgctcacat

SEQ ID NO: 262 - DNA, 10929 bp, Artificial sequence
  pCLS12092
atgtgagcaaaaggccagcaaaaggccaggaaccgtaaaaaggccgcgttgctggcgtttttccataggctccgcccccctgacgagcatcacaaaaatcgacgctcaagtcagaggtggcgaaacccgacaggactataaagataccaggcgtttccccctggaagctccctcgtgcgctctcctgttccgaccctgccgcttaccggatacctgtccgcctttctcccttcgggaagcgtggcgctttctcatagctcacgctgtaggtatctcagttcggtgtaggtcgttcgctccaagctgggctgtgtgcacgaaccccccgttcagcccgaccgctgcgccttatccggtaactatcgtcttgagtccaacccggtaagacacgacttatcgccactggcagcagccactggtaacaggattagcagagcgaggtatgtaggcggtgctacagagttcttgaagtggtggcctaactacggctacactagaaggacagtatttggtatctgcgctctgctgaagccagttaccttcggaaaaagagttggtagctcttgatccggcaaacaaaccaccgctggtagcggtggtttttttgtttgcaagcagcagattacgcgcagaaaaaaaggatctcaagaagatcctttgatcttttctacggggtctgacgctcagtggaacgaaaactcacgttaagggattttggtcatgagattatcaaaaaggatcttcacctagatccttttaaattaaaaatgaagttttaaatcaatctaaagtatatatgagtaaacttggtctgacagttaccaatgcttaatcagtgaggcacctatctcagcgatctgtctatttcgttcatccatagttgcctgactccccgtcgtgtagataactacgatacgggagggcttaccatctggccccagtgctgcaatgataccgcgagacccacgctcaccggctccagatttatcagcaataaaccagccagccggaagggccgagcgcagaagtggtcctgcaactttatccgcctccatccagtctattaattgttgccgggaagctagagtaagtagttcgccagttaatagtttgcgcaacgttgttgccattgctacaggcatcgtggtgtcacgctcgtcgtttggtatggcttcattcagctccggttcccaacgatcaaggcgagttacatgatcccccatgttgtgcaaaaaagcggttagctccttcggtcctccgatcgttgtcagaagtaagttggccgcagtgttatcactcatggttatggcagcactgcataattctcttactgtcatgccatccgtaagatgcttttctgtgactggtgagtactcaaccaagtcattctgagaatagtgtatgcggcgaccgagttgctcttgcccggcgtcaatacgggataataccgcgccacatagcagaactttaaaagtgctcatcattggaaaacgttcttcggggcgaaaactctcaaggatcttaccgctgttgagatccagttcgatgtaacccactcgtgcacccaactgatcttcagcatcttttactttcaccagcgtttctgggtgagcaaaaacaggaaggcaaaatgccgcaaaaaagggaataagggcgacacggaaatgttgaatactcatactcttcctttttcaatattattgaagcatttatcagggttattgtctcatgagcggatacatatttgaatgtatttagaaaaataaacaaataggggttccgcgcacatttccccgaaaagtgccacctgacgtccgatcaaaaatcatcgcttcgctgattaattaccccagaaataaggctaaaaaactaatcgcattatcatcctatggttgttaatttgattcgttcatttgaaggtttgtggggccaggttactgccaatttttcctcttcataaccataaaagctagtattgtagaatctttattgttcggagcagtgcggcgcgaggcacatctgcgtttcaggaacgcgaccggtgaagacgaggacgcacggaggagagtcttccttcggagggctgtcacccgctcggcggcttctaatccgtacttcaatatagcaatgagcagttaagcgtattactgaaagttccaaagagaaggtttttttaggctaatcgacctcgagcagatccgccaggcgtgtatatagcgtggatggccaggcaactttagtgctgacacatacaggcatatatatatgtgtgcgacgacacatgatcatatggcatgcatgtgctctgtatgtatataaaactcttgttttcttcttttctctaaatattctttccttatacattaggtcctttgtagcataaattactatacttctatagacacgcaaacacaaatacacagcggccttgccaccatggtggatctacgcacgctcggctacagccagcagcaacaggagaagatcaaaccgaaggttcgttcgacagtggcgcagcaccacgaggcactggtcggccacgggtttacacacgcgcacatcgttgcgttaagccaacacccggcagcgttagggaccgtcgctgtcaagtatcaggacatgatcgcagcgttgccagaggcgacacacgaagcgatcgttggcgtcggcaaacagtggtccggcgcacgcgctctggaggccttgctcacggtggcgggagagttgagaggtccaccgttacagttggacacaggccaacttctcaagattgcaaaacgtggcggcgtgaccgcagtggaggcagtgcatgcatggcgcaatgcactgacgggtgccccgctcaacttgaccccggagcaggtggtggccatcgccagccacgatggcggcaagcaggcgctggagacggtccagcggctgttgccggtgctgtgccaggcccacggcttgaccccccagcaggtggtggccatcgccagcaatggcggtggcaagcaggcgctggagacggtccagcggctgttgccggtgctgtgccaggcccacggcttgaccccggagcaggtggtggccatcgccagcaatattggtggcaagcaggcgctggagacggtgcaggcgctgttgccggtgctgtgccaggcccacggcttgaccccccagcaggtggtggccatcgccagcaatggcggtggcaagcaggcgctggagacggtccagcggctgttgccggtgctgtgccaggcccacggcttgaccccggagcaggtggtggccatcgccagcaatattggtggcaagcaggcgctggagacggtgcaggcgctgttgccggtgctgtgccaggcccacggcttgaccccggagcaggtggtggccatcgccagcaatattggtggcaagcaggcgctggagacggtgcaggcgctgttgccggtgctgtgccaggcccacggcttgaccccggagcaggtggtggccatcgccagcaatattggtggcaagcaggcgctggagacggtgcaggcgctgttgccggtgctgtgccaggcccacggcttgaccccggagcaggtggtggccatcgccagccacgatggcggcaagcaggcgctggagacggtccagcggctgttgccggtgctgtgccaggcccacggcttgaccccggagcaggtggtggccatcgccagccacgatggcggcaagcaggcgctggagacggtccagcggctgttgccggtgctgtgccaggcccacggcttgaccccccagcaggtggtggccatcgccagcaatggcggtggcaagcaggcgctggagacggtccagcggctgttgccggtgctgtgccaggcccacggcttgaccccggagcaggtggtggccatcgccagcaatattggtggcaagcaggcgctggagacggtgcaggcgctgttgccggtgctgtgccaggcccacggcttgaccccggagcaggtggtggccatcgccagcaatattggtggcaagcaggcgctggagacggtgcaggcgctgttgccggtgctgtgccaggcccacggcttgaccccggagcaggtggtggccatcgccagccacgatggcggcaagcaggcgctggagacggtccagcggctgttgccggtgctgtgccaggcccacggcttgaccccggagcaggtggtggccatcgccagccacgatggcggcaagcaggcgctggagacggtccagcggctgttgccggtgctgtgccaggcccacggcttgaccccggagcaggtggtggccatcgccagccacgatggcggcaagcaggcgctggagacggtccagcggctgttgccggtgctgtgccaggcccacggcttgaccccccagcaggtggtggccatcgccagcaatggcggtggcaagcaggcgctggagacggtccagcggctgttgccggtgctgtgccaggcccacggcttgaccccggagcaggtggtggccatcgccagccacgatggcggcaagcaggcgctggagacggtccagcggctgttgccggtgctgtgccaggcccacggcttgacccctcagcaggtggtggccatcgccagcaatggcggcggcaggccggcgctggagagcattgttgcccagttatctcgccctgatccgggatccaagtctggcatctaccagattaagaacaccctgaataacaaagtgtatgttggatctgccaaggactttgagaaaagatggaagaggcacttcaaggatctggaaaagggttgccacagctccatcaagctccaaaggtctttcaacaaacatggcaatgtctttgagtgctccattttggaagagatcccttatgaaaaggacctcattatagagagggaaaacttctggatcaaggagctgaactcaaaaatcaatggatacaacattgcagatgccacatttggtgacacctgttctactcacccccttaaggaagagatcattaaaaagaggtctgagactgtgaaggctaagatgttgaaacaaggtccatcggccgactgataactcgagcgatcctctagacgagctcctcgagcctgcagcagctgaagctttggacttcttcgccagaggtttggtcaagtctccaatcaaggttgtcggcttgtctaccttgccagaaatttacgaaaagatggaaaagggtcaaatcgttggtagatacgttgttgacacttctaaataagcgaatttcttatgatttatgatttttattattaaataagttataaaaaaaataagtgtatacaaattttaaagtgactcttaggttttaaaacgaaaattcttattcttgagtaactctttcctgtaggtcaggttgctttctcaggtatagcatgaggtcgctcttattgaccacacctctaccggcatgcaagcttggcgtaatcatggtcatagctgtttcctgtgtgaaattgttatccgctcacaattccacacaacatacgagccggaagcataaagtgtaaagcctggggtgcctaatgagtgagctaactcacattaattgcgttgcgctcactgcccgctttccagtcgggaaacctgtcgtgccagcagatctattacattatgggtggtatgttggaataaaaatcaactatcatctactaactagtatttacgttactagtatattatcatatacggtgttagaagatgacgcaaatgatgagaaatagtcatctaaattagtggaagctgaaacgcaaggattgataatgtaataggatcaatgaatattaacatataaaatgatgataataatatttatagaattgtgtagaattgcagattcccttttatggattcctaaatcctcgaggagaacttctagtatatctacatacctaatattattgccttattaaaaatggaatcccaacaattacatcaaaatccacattctcttcaaaatcaattgtcctgtacttccttgttcatgtgtgttcaaaaacgttatatttataggataattatactctatttctcaacaagtaattggttgtttggccgagcggtctaaggcgcctgattcaagaaatatcttgaccgcagttaactgtgggaatactcaggtatcgtaagatgcaagagttcgaatctcttagcaaccattatttttttcctcaacataacgagaacacacaggggcgctatcgcacagaatcaaattcgatgactggaaattttttgttaatttcagaggtcgcctgacgcatatacctttttcaactgaaaaattgggagaaaaaggaaaggtgagagccgcggaaccggcttttcatatagaatagagaagcgttcatgactaaatgcttgcatcacaatacttgaagttgacaatattatttaaggacctattgttttttccaataggtggttagcaatcgtcttactttctaacttttcttaccttttacatttcagcaatatatatatatatatttcaaggatataccattctaatgtctgcccctaagaagatcgtcgttttgccaggtgaccacgttggtcaagaaatcacagccgaagccattaaggttcttaaagctatttctgatgttcgttccaatgtcaagttcgatttcgaaaatcatttaattggtggtgctgctatcgatgctacaggtgtcccacttccagatgaggcgctggaagcctccaagaaggttgatgccgttttgttaggtgctgtgggtggtcctaaatggggtaccggtagtgttagacctgaacaaggtttactaaaaatccgtaaagaacttcaattgtacgccaacttaagaccatgtaactttgcatccgactctcttttagacttatctccaatcaagccacaatttgctaaaggtactgacttcgttgttgtcagagaattagtgggaggtatttactttggtaagagaaaggaagacgatggtgatggtgtcgcttgggatagtgaacaatacaccgttccagaagtgcaaagaatcacaagaatggccgctttcatggccctacaacatgagccaccattgcctatttggtccttggataaagctaatgttttggcctcttcaagattatggagaaaaactgtggaggaaaccatcaagaacgaattccctacattgaaggttcaacatcaattgattgattctgccgccatgatcctagttaagaacccaacccacctaaatggtattataatcaccagcaacatgtttggtgatatcatctccgatgaagcctccgttatcccaggttccttgggtttgttgccatctgcgtccttggcctctttgccagacaagaacaccgcatttggtttgtacgaaccatgccacggttctgctccagatttgccaaagaataaggtcaaccctatcgccactatcttgtctgctgcaatgatgttgaaattgtcattgaacttgcctgaagaaggtaaggccattgaagatgcagttaaaaaggttttggatgcaggtatcagaactggtgatttaggtggttccaacagtaccacggaagtcggtgatgctgtcgccgaagaagttaagaaaatccttgcttaaaaagattctctttttttatgatatttgtacataaactttataaatgaaattcataatagaaacgacacgaaattacaaaatggaatatgttcatagggtagacgaaactatatacgcaatctacatacatttatcaagaaggagaaaaaggaggatgtaaaggaatacaggtaagcaaattgatactaatggctcaacgtgataaggaaaaagaattgcactttaacattaatattgacaaggaggagggcaccacacaaaaagttaggtgtaacagaaaatcatgaaactatgattcctaatttatatattggaggattttctctaaaaaaaaaaaaatacaacaaataaaaaacactcaatgacctgaccatttgatggagtttaagtcaataccttcttgaaccatttcccataatggtgaaagttccctcaagaattttactctgtcagaaacggccttaacgacgtagtcgacctcctcttcagtactaaatctaccaataccaaatctgatggaagaatgggctaatgcatcatccttacccagcgcatgtaaaacataagaaggttctagggaagcagatgtacaggctgaacccgaggataatgcgatatcccttagtgccatcaataaagattctccttccacgtaggcgaaagaaacgttaacacaccctggataacgatgatctggagatccgttcaacgtggtatgttcagcggataatagacctttgactaatttatcggatagtcttttgatgtgagcttggtcgttgtcaaattctttcttcatcaatctcgcagcttcaccaaatcccgctaccaatgggggggccaaagtaccagatctgctgcattaatgaatcggccaacgcgcggggagaggcggtttgcgtattgggcgctcttccgcttcctcgctcactgactcgctgcgctcggtcgttcggctgcggcgagcggtatcagcatcgatgaattccacggactatagactatactagtatactccgtctactgtacgatacacttccgctcaggtccttgtcctttaacgaggccttaccactcttttgttactctattgatccagctcagcaaaggcagtgtgatctaagattctatcttcgcgatgtagtaaaactagctagaccgagaaagagactagaaatgcaaaaggcacttctacaatggctgccatcattattatccgatgtgacgctgcagcttctcaatgatattcgaatacgctttgaggagatacagcctaatatccgacaaactgttttacagatttacgatcgtacttgttacccatcattgaattttgaacatccgaacctgggagttttccctgaaacagatagtatatttgaacctgtataataatatatagtctagcgctttacggaagacaatgtatgtatttcggttcctggagaaactattgcatctattgcataggtaatcttgcacgtcgcatccccggttcattttctgcgtttccatcttgcacttcaatagcatatctttgttaacgaagcatctgtgcttcattttgtagaacaaaaatgcaacgcgagagcgctaatttttcaaacaaagaatctgagctgcatttttacagaacagaaatgcaacgcgaaagcgctattttaccaacgaagaatctgtgcttcatttttgtaaaacaaaaatgcaacgcgagagcgctaatttttcaaacaaagaatctgagctgcatttttacagaacagaaatgcaacgcgagagcgctattttaccaacaaagaatctatacttcttttttgttctacaaaaatgcatcccgagagcgctatttttctaacaaagcatcttagattactttttttctcctttgtgcgctctataatgcagtctcttgataactttttgcactgtaggtccgttaaggttagaagaaggctactttggtgtctattttctcttccataaaaaaagcctgactccacttcccgcgtttactgattactagcgaagctgcgggtgcattttttcaagataaaggcatccccgattatattctataccgatgtggattgcgcatactttgtgaacagaaagtgatagcgttgatgattcttcattggtcagaaaattatgaacggtttcttctattttgtctctatatactacgtataggaaatgtttacattttcgtattgttttcgattcactctatgaatagttcttactacaatttttttgtctaaagagtaatactagagataaacataaaaaatgtagaggtcgagtttagatgcaagttcaaggagcgaaaggtggatgggtaggttatatagggatatagcacagagatatatagcaaagagatacttttgagcaatgtttgtggaagcggtattcgcaatattttagtagctcgttacagtccggtgcgtttttggttttttgaaagtgcgtcttcagagcgcttttggttttcaaaagcgctctgaagttcctatactttctagagaataggaacttcggaataggaacttcaaagcgtttccgaaaacgagcgcttccgaaaatgcaacgcgagctgcgcacatacagctcactgttcacgtcgcacctatatctgcgtgttgcctgtatatatatatacatgagaagaacggcatagtgcgtgtttatgcttaaatgcgtacttatatgcgtctatttatgtaggatgaaaggtagtctagtacctcctgtgatattatcccattccatgcggggtatcgtatgcttccttcagcactaccctttagctgttctatatgctgccactcctcaattggattagtctcatccttcaatgctatcatttcctttgatattggatcatatgcatagtaccgagaaactagtgcgaagtagtgatcaggtattgctgttatctgatgagtatacgttgtcctggccacggcagaagcacgcttatcgctccaatttcccacaacattagtcaactccgttaggcccttcattgaaagaaatgaggtcatcaaatgtcttccaatgtgagattttgggccattttttatagcaaagattgaataaggcgcatttttcttcaaagctttattgtacgatctgactaagttatcttttaataattggtattcctgtttattgcttgaagaattgccggtcctatttactcgttttaggactggttcagaattcatcgatgctcactcaaaggtcggtaatacggttatccacagaatcaggggataacgcaggaaagaac

SEQ ID NO: 263 - DNA, 36 bp, Artificial sequence
  CMP_G067
ggtatttccggatggaccttgacctttcatcttgcc

SEQ ID NO: 264 - DNA, 53 bp, Artificial sequence
  CMP_G152
atattttccggagttagatggtttcttacctttcatcttgcctgaaattttgg

SEQ ID NO: 265 - DNA, 36 bp, Artificial sequence
  CMP_G114
ggtatttccggatggaccttgtttcaacatcttagc

SEQ ID NO: 266 - DNA, 4094 bp, Artificial sequence
  pCLS15777
ggtctttcctgcgttatcccctgattctgtggataaccgtattaccgcctttgagtgagctgataccgctcgccgcagccgaacgaccgagcgcagcgagtcagtgagcgaggaagcggagagcgcccaatacgcaaaccgcctctccccgcgcgttggccgattcattaatgcagctggcacgacaggtttcccgactggaaagcgggcagtgagcgcaacgcaattaatgtgagttagctcactcattaggcaccccaggctttacactttatgcttccggctcgtatgttgtgtggaattgtgagcggataacaatttcacacaggaaacagctatgaccatgattacgccaagcgcgtcaattaaccctcactaaagggaacaaaagctgttaattaagcgcgccacacgcaaacacaaatacacagcggccttgccaccatggccaagtctggcatctaccagattaagaacaccctgaataacaaagtgtatgttggatctgccaaggactttgagaaaagatggaagaggcacttcaaggatctggaaaagggttgccacagctccatcaagctccaaaggtctttcaacaaacatggcaatgtctttgagtgctccattttggaagagatcccttatgaaaaggacctcattatagagagggaaaacttctggatcaaggagctgaactcaaaaatcaatggatacaacattgcagatgccacatttggtgacacctgttctactcacccccttaaggaagagatcattaaaaagaggtctgagactgtgaaggctaagatgttgaaactggggcctgatggcagaaaggcactctactctaagccaggtagcaaaaatggaaggtggaaccctgagacccacaagttctgcaaatgtggggtgagaatacagacatcagcctacacttgcagcaagtgtaggaacagatcaggagagaataactcctttttcaaccacaagcattctgacatcaccaagtccaaaatttcaggcaagatgaaaggtaagaaaccatctaactccggagtggatctacgcacgctcggctacagccagcagcaacaggagaagatcaaaccgaaggttcgttcgacagtggcgcagcaccacgaggcactggtcggccacgggtttacacacgcgcacatcgttgcgttaagccaacacccggcagcgttagggaccgtcgctgtcaagtatcaggacatgatcgcagcgttgccagaggcgacacacgaagcgatcgttggcgtcggcaaacagtggtccggcgcacgcgctctggaggccttgctcacggtggcgggagagttgagaggtccaccgttacagttggacacaggccaacttctcaagattgcaaaacgtggcggcgtgaccgcagtggaggcagtgcatgcatggcgcaatgcactgacgggtgccccgctcaacttgaccggagacgcccgggggatcaggtcacgtgcgtctcggagcattgttgcccagttatctcgccctgatccgtcggccgactgataagtcgaccaccaccaccaccaccactgataagagctcctcgagcctgcagcagctgaagctttggacttctggcgcgcccaattcgccctatagtgagtcgtattacgtcgcgctcactggccgtcgttttacaacgtcgtgactgggaaaaccctggcgttacccaacttaatcgccttgcagcacatccccctttcgccagctggcgtaatagcgaagaggcccgcaccgaaacgcccttcccaacagttgcgcagcctgaatggcgaatgggagcgccctgtagcggcgcattaagcgcggcgggtgtggtggttacgcgcagcgtgaccgctacacttgccagcgccctagcgcccgctcctttcgctttcttcccttcctttctcgccacgttcgccggctttccccgtcaagctctaaatcgggggctccctttagggttccgatttagtgctttacggcacctcgaccccaaaaaacttgattagggtgatggttggcctgtagtgggccatagccctgatagacggtttttcgccctttgacgttggagtccacgttctttaatagtggactcttgttccaaactggaacaacactcaaccctatctcggtctattcttttgatttataagggattttgccgatttcggcctattggttaaaaaatgagctgatttaacaaaaatttaacgcgaattttaacaaaatattaacgcttacaatttaggtggcacttttcggggaaatgtgcgcggaacccctatttgtttatttttctaaatacattcaaatatgtatccgctcatgagacaataaccctgataaatgcttcaataatattgaaaaaggaagagtatgagtattcaacatttccgtgtcgcccttattcccttttttgcggcattttgccttcctgtttttgctcacccagaaacgctggtgaaagtaaaagatgctgaagatcagttgggtgcacgagtgggttacatcgaactggatctcaacagcggtaagatccttgagagttttcgccccgaagaacgttttccaatgatgagcacttttaaagttctgctatgtggcgcggtattatcccgtattgacgccgggcaagagcaactcggtcgccgcatacactattctcagaatgacttggttgagtactcaccagtcacagaaaagcatcttacggatggcatgacagtaagagaattatgcagtgctgccataaccatgagtgataacactgcggccaacttacttctgacaacgatcggaggaccgaaggagctaaccgcttttttgcacaacatgggggatcatgtaactcgccttgatcgttgggaaccggagctgaatgaagccataccaaacgacgagcgtgacaccacgatgcctgtagcaatggcaacaacgttgcgcaaactattaactggcgaactacttactctagcttcccggcaacaattaatagactggatggaggcggataaagttgcaggaccacttctgcgctcggcccttccggctggctggtttattgctgataaatctggagccggtgagcgtggttctcgcggtatcattgcagcactggggccagatggtaagccctcccgtatcgtagttatctacacgacggggagtcaggcaactatggatgaacgaaatagacagatcgctgagataggtgcctcactgattaagcattggtaactgtcagaccaagtttactcatatatactttagattgatttaaaacttcatttttaatttaaaaggatctaggtgaagatcctttttgataatctcatgaccaaaatcccttaacgtgagttttcgttccactgagcgtcagaccccgtagaaaagatcaaaggatcttcttgagatcctttttttctgcgcgtaatctgctgcttgcaaacaaaaaaaccaccgctaccagcggtggtttgtttgccggatcaagagctaccaactctttttccgaaggtaactggcttcagcagagcgcagataccaaatactgttcttctagtgtagccgtagttaggccaccacttcaagaactctgtagcaccgcctacatacctcgctctgctaatcctgttaccagtggctgctgccagtggcgataagtcgtgtcttaccgggttggactcaagacgatagttaccggataaggcgcagcggtcgggctgaacggggggttcgtgcacacagcccagcttggagcgaacgacctacaccgaactgagatacctacagcgtgagctatgagaaagcgccacgcttcccgaagggagaaaggcggacaggtatccggtaagcggcagggtcggaacaggagagcgcacgagggagcttccagggggaaacgcctggtatctttatagtcctgtcgggtttcgccacctctgacttgagcgtcgatttttgtgatgctcgtcaggggggcggagcctatggaaaaacgccagcaacgcggcctttttacggttcctggccttttgctggccttttgctcacat

SEQ ID NO: 267 - DNA, 4088 bp, Artificial sequence
  pCLS15778
ggtctttcctgcgttatcccctgattctgtggataaccgtattaccgcctttgagtgagctgataccgctcgccgcagccgaacgaccgagcgcagcgagtcagtgagcgaggaagcggagagcgcccaatacgcaaaccgcctctccccgcgcgttggccgattcattaatgcagctggcacgacaggtttcccgactggaaagcgggcagtgagcgcaacgcaattaatgtgagttagctcactcattaggcaccccaggctttacactttatgcttccggctcgtatgttgtgtggaattgtgagcggataacaatttcacacaggaaacagctatgaccatgattacgccaagcgcgtcaattaaccctcactaaagggaacaaaagctgttaattaagcgcgccacacgcaaacacaaatacacagcggccttgccaccatggccaagtctggcatctaccagattaagaacaccctgaataacaaagtgtatgttggatctgccaaggactttgagaaaagatggaagaggcacttcaaggatctggaaaagggttgccacagctccatcaagctccaaaggtctttcaacaaacatggcaatgtctttgagtgctccattttggaagagatcccttatgaaaaggacctcattatagagagggaaaacttctggatcaaggagctgaactcaaaaatcaatggatacaacattgcagatgccacatttggtgacacctgttctactcacccccttaaggaagagatcattaaaaagaggtctgagactgtgaaggctaagatgttgaaactggggcctgatggcagaaaggcactctactctaagccaggtagcaaaaatggaaggtggaaccctgagacccacaagttctgcaaatgtggggtgagaatacagacatcagcctacacttgcagcaagtgtaggaacagatcaggagagaataactcctttttcaaccacaagcattctgacatcaccaagtccaaaatttcaggcaagatgaaaggtcaaggtccatccggagtggatctacgcacgctcggctacagccagcagcaacaggagaagatcaaaccgaaggttcgttcgacagtggcgcagcaccacgaggcactggtcggccacgggtttacacacgcgcacatcgttgcgttaagccaacacccggcagcgttagggaccgtcgctgtcaagtatcaggacatgatcgcagcgttgccagaggcgacacacgaagcgatcgttggcgtcggcaaacagtggtccggcgcacgcgctctggaggccttgctcacggtggcgggagagttgagaggtccaccgttacagttggacacaggccaacttctcaagattgcaaaacgtggcggcgtgaccgcagtggaggcagtgcatgcatggcgcaatgcactgacgggtgccccgctcaacttgaccggagacgcccgggggatcaggtcacgtgcgtctcggagcattgttgcccagttatctcgccctgatccgtcggccgactgataagtcgaccaccaccaccaccaccactgataagagctcctcgagcctgcagcagctgaagctttggacttctggcgcgcccaattcgccctatagtgagtcgtattacgtcgcgctcactggccgtcgttttacaacgtcgtgactgggaaaaccctggcgttacccaacttaatcgccttgcagcacatccccctttcgccagctggcgtaatagcgaagaggcccgcaccgaaacgcccttcccaacagttgcgcagcctgaatggcgaatgggagcgccctgtagcggcgcattaagcgcggcgggtgtggtggttacgcgcagcgtgaccgctacacttgccagcgccctagcgcccgctcctttcgctttcttcccttcctttctcgccacgttcgccggctttccccgtcaagctctaaatcgggggctccctttagggttccgatttagtgctttacggcacctcgaccccaaaaaacttgattagggtgatggttggcctgtagtgggccatagccctgatagacggtttttcgccctttgacgttggagtccacgttctttaatagtggactcttgttccaaactggaacaacactcaaccctatctcggtctattcttttgatttataagggattttgccgatttcggcctattggttaaaaaatgagctgatttaacaaaaatttaacgcgaattttaacaaaatattaacgcttacaatttaggtggcacttttcggggaaatgtgcgcggaacccctatttgtttatttttctaaatacattcaaatatgtatccgctcatgagacaataaccctgataaatgcttcaataatattgaaaaaggaagagtatgagtattcaacatttccgtgtcgcccttattcccttttttgcggcattttgccttcctgtttttgctcacccagaaacgctggtgaaagtaaaagatgctgaagatcagttgggtgcacgagtgggttacatcgaactggatctcaacagcggtaagatccttgagagttttcgccccgaagaacgttttccaatgatgagcacttttaaagttctgctatgtggcgcggtattatcccgtattgacgccgggcaagagcaactcggtcgccgcatacactattctcagaatgacttggttgagtactcaccagtcacagaaaagcatcttacggatggcatgacagtaagagaattatgcagtgctgccataaccatgagtgataacactgcggccaacttacttctgacaacgatcggaggaccgaaggagctaaccgcttttttgcacaacatgggggatcatgtaactcgccttgatcgttgggaaccggagctgaatgaagccataccaaacgacgagcgtgacaccacgatgcctgtagcaatggcaacaacgttgcgcaaactattaactggcgaactacttactctagcttcccggcaacaattaatagactggatggaggcggataaagttgcaggaccacttctgcgctcggcccttccggctggctggtttattgctgataaatctggagccggtgagcgtggttctcgcggtatcattgcagcactggggccagatggtaagccctcccgtatcgtagttatctacacgacggggagtcaggcaactatggatgaacgaaatagacagatcgctgagataggtgcctcactgattaagcattggtaactgtcagaccaagtttactcatatatactttagattgatttaaaacttcatttttaatttaaaaggatctaggtgaagatcctttttgataatctcatgaccaaaatcccttaacgtgagttttcgttccactgagcgtcagaccccgtagaaaagatcaaaggatcttcttgagatcctttttttctgcgcgtaatctgctgcttgcaaacaaaaaaaccaccgctaccagcggtggtttgtttgccggatcaagagctaccaactctttttccgaaggtaactggcttcagcagagcgcagataccaaatactgttcttctagtgtagccgtagttaggccaccacttcaagaactctgtagcaccgcctacatacctcgctctgctaatcctgttaccagtggctgctgccagtggcgataagtcgtgtcttaccgggttggactcaagacgatagttaccggataaggcgcagcggtcgggctgaacggggggttcgtgcacacagcccagcttggagcgaacgacctacaccgaactgagatacctacagcgtgagctatgagaaagcgccacgcttcccgaagggagaaaggcggacaggtatccggtaagcggcagggtcggaacaggagagcgcacgagggagcttccagggggaaacgcctggtatctttatagtcctgtcgggtttcgccacctctgacttgagcgtcgatttttgtgatgctcgtcaggggggcggagcctatggaaaaacgccagcaacgcggcctttttacggttcctggccttttgctggccttttgctcacat

SEQ ID NO: 268 - DNA, 3869 bp, Artificial sequence
  pCLS15779
ggtctttcctgcgttatcccctgattctgtggataaccgtattaccgcctttgagtgagctgataccgctcgccgcagccgaacgaccgagcgcagcgagtcagtgagcgaggaagcggagagcgcccaatacgcaaaccgcctctccccgcgcgttggccgattcattaatgcagctggcacgacaggtttcccgactggaaagcgggcagtgagcgcaacgcaattaatgtgagttagctcactcattaggcaccccaggctttacactttatgcttccggctcgtatgttgtgtggaattgtgagcggataacaatttcacacaggaaacagctatgaccatgattacgccaagcgcgtcaattaaccctcactaaagggaacaaaagctgttaattaagcgcgccacacgcaaacacaaatacacagcggccttgccaccatggccaagtctggcatctaccagattaagaacaccctgaataacaaagtgtatgttggatctgccaaggactttgagaaaagatggaagaggcacttcaaggatctggaaaagggttgccacagctccatcaagctccaaaggtctttcaacaaacatggcaatgtctttgagtgctccattttggaagagatcccttatgaaaaggacctcattatagagagggaaaacttctggatcaaggagctgaactcaaaaatcaatggatacaacattgcagatgccacatttggtgacacctgttctactcacccccttaaggaagagatcattaaaaagaggtctgagactgtgaaggctaagatgttgaaacaaggtccatccggagtggatctacgcacgctcggctacagccagcagcaacaggagaagatcaaaccgaaggttcgttcgacagtggcgcagcaccacgaggcactggtcggccacgggtttacacacgcgcacatcgttgcgttaagccaacacccggcagcgttagggaccgtcgctgtcaagtatcaggacatgatcgcagcgttgccagaggcgacacacgaagcgatcgttggcgtcggcaaacagtggtccggcgcacgcgctctggaggccttgctcacggtggcgggagagttgagaggtccaccgttacagttggacacaggccaacttctcaagattgcaaaacgtggcggcgtgaccgcagtggaggcagtgcatgcatggcgcaatgcactgacgggtgccccgctcaacttgaccggagacgcccgggggatcaggtcacgtgcgtctcggagcattgttgcccagttatctcgccctgatccgtcggccgactgataagtcgaccaccaccaccaccaccactgataagagctcctcgagcctgcagcagctgaagctttggacttctggcgcgcccaattcgccctatagtgagtcgtattacgtcgcgctcactggccgtcgttttacaacgtcgtgactgggaaaaccctggcgttacccaacttaatcgccttgcagcacatccccctttcgccagctggcgtaatagcgaagaggcccgcaccgaaacgcccttcccaacagttgcgcagcctgaatggcgaatgggagcgccctgtagcggcgcattaagcgcggcgggtgtggtggttacgcgcagcgtgaccgctacacttgccagcgccctagcgcccgctcctttcgctttcttcccttcctttctcgccacgttcgccggctttccccgtcaagctctaaatcgggggctccctttagggttccgatttagtgctttacggcacctcgaccccaaaaaacttgattagggtgatggttggcctgtagtgggccatagccctgatagacggtttttcgccctttgacgttggagtccacgttctttaatagtggactcttgttccaaactggaacaacactcaaccctatctcggtctattcttttgatttataagggattttgccgatttcggcctattggttaaaaaatgagctgatttaacaaaaatttaacgcgaattttaacaaaatattaacgcttacaatttaggtggcacttttcggggaaatgtgcgcggaacccctatttgtttatttttctaaatacattcaaatatgtatccgctcatgagacaataaccctgataaatgcttcaataatattgaaaaaggaagagtatgagtattcaacatttccgtgtcgcccttattcccttttttgcggcattttgccttcctgtttttgctcacccagaaacgctggtgaaagtaaaagatgctgaagatcagttgggtgcacgagtgggttacatcgaactggatctcaacagcggtaagatccttgagagttttcgccccgaagaacgttttccaatgatgagcacttttaaagttctgctatgtggcgcggtattatcccgtattgacgccgggcaagagcaactcggtcgccgcatacactattctcagaatgacttggttgagtactcaccagtcacagaaaagcatcttacggatggcatgacagtaagagaattatgcagtgctgccataaccatgagtgataacactgcggccaacttacttctgacaacgatcggaggaccgaaggagctaaccgcttttttgcacaacatgggggatcatgtaactcgccttgatcgttgggaaccggagctgaatgaagccataccaaacgacgagcgtgacaccacgatgcctgtagcaatggcaacaacgttgcgcaaactattaactggcgaactacttactctagcttcccggcaacaattaatagactggatggaggcggataaagttgcaggaccacttctgcgctcggcccttccggctggctggtttattgctgataaatctggagccggtgagcgtggttctcgcggtatcattgcagcactggggccagatggtaagccctcccgtatcgtagttatctacacgacggggagtcaggcaactatggatgaacgaaatagacagatcgctgagataggtgcctcactgattaagcattggtaactgtcagaccaagtttactcatatatactttagattgatttaaaacttcatttttaatttaaaaggatctaggtgaagatcctttttgataatctcatgaccaaaatcccttaacgtgagttttcgttccactgagcgtcagaccccgtagaaaagatcaaaggatcttcttgagatcctttttttctgcgcgtaatctgctgcttgcaaacaaaaaaaccaccgctaccagcggtggtttgtttgccggatcaagagctaccaactctttttccgaaggtaactggcttcagcagagcgcagataccaaatactgttcttctagtgtagccgtagttaggccaccacttcaagaactctgtagcaccgcctacatacctcgctctgctaatcctgttaccagtggctgctgccagtggcgataagtcgtgtcttaccgggttggactcaagacgatagttaccggataaggcgcagcggtcgggctgaacggggggttcgtgcacacagcccagcttggagcgaacgacctacaccgaactgagatacctacagcgtgagctatgagaaagcgccacgcttcccgaagggagaaaggcggacaggtatccggtaagcggcagggtcggaacaggagagcgcacgagggagcttccagggggaaacgcctggtatctttatagtcctgtcgggtttcgccacctctgacttgagcgtcgatttttgtgatgctcgtcaggggggcggagcctatggaaaaacgccagcaacgcggcctttttacggttcctggccttttgctggccttttgctcacat

SEQ ID NO: 269 - DNA, 5846 bp, Artificial sequence
  pCLS15780
ggtctttcctgcgttatcccctgattctgtggataaccgtattaccgcctttgagtgagctgataccgctcgccgcagccgaacgaccgagcgcagcgagtcagtgagcgaggaagcggagagcgcccaatacgcaaaccgcctctccccgcgcgttggccgattcattaatgcagctggcacgacaggtttcccgactggaaagcgggcagtgagcgcaacgcaattaatgtgagttagctcactcattaggcaccccaggctttacactttatgcttccggctcgtatgttgtgtggaattgtgagcggataacaatttcacacaggaaacagctatgaccatgattacgccaagcgcgtcaattaaccctcactaaagggaacaaaagctgttaattaagcgcgccacacgcaaacacaaatacacagcggccttgccaccatggccaagtctggcatctaccagattaagaacaccctgaataacaaagtgtatgttggatctgccaaggactttgagaaaagatggaagaggcacttcaaggatctggaaaagggttgccacagctccatcaagctccaaaggtctttcaacaaacatggcaatgtctttgagtgctccattttggaagagatcccttatgaaaaggacctcattatagagagggaaaacttctggatcaaggagctgaactcaaaaatcaatggatacaacattgcagatgccacatttggtgacacctgttctactcacccccttaaggaagagatcattaaaaagaggtctgagactgtgaaggctaagatgttgaaactggggcctgatggcagaaaggcactctactctaagccaggtagcaaaaatggaaggtggaaccctgagacccacaagttctgcaaatgtggggtgagaatacagacatcagcctacacttgcagcaagtgtaggaacagatcaggagagaataactcctttttcaaccacaagcattctgacatcaccaagtccaaaatttcaggcaagatgaaaggtaagaaaccatctaactccggagtggatctacgcacgctcggctacagccagcagcaacaggagaagatcaaaccgaaggttcgttcgacagtggcgcagcaccacgaggcactggtcggccacgggtttacacacgcgcacatcgttgcgttaagccaacacccggcagcgttagggaccgtcgctgtcaagtatcaggacatgatcgcagcgttgccagaggcgacacacgaagcgatcgttggcgtcggcaaacagtggtccggcgcacgcgctctggaggccttgctcacggtggcgggagagttgagaggtccaccgttacagttggacacaggccaacttctcaagattgcaaaacgtggcggcgtgaccgcagtggaggcagtgcatgcatggcgcaatgcactgacgggtgccccgctcaacttgaccccggagcaggtggtggccatcgccagccacgatggcggcaagcaggcgctggagacggtccagcggctgttgccggtgctgtgccaggcccacggcttgaccccccagcaggtggtggccatcgccagcaatggcggtggcaagcaggcgctggagacggtccagcggctgttgccggtgctgtgccaggcccacggcttgaccccggagcaggtggtggccatcgccagcaatattggtggcaagcaggcgctggagacggtgcaggcgctgttgccggtgctgtgccaggcccacggcttgaccccccagcaggtggtggccatcgccagcaatggcggtggcaagcaggcgctggagacggtccagcggctgttgccggtgctgtgccaggcccacggcttgaccccggagcaggtggtggccatcgccagcaatattggtggcaagcaggcgctggagacggtgcaggcgctgttgccggtgctgtgccaggcccacggcttgaccccggagcaggtggtggccatcgccagcaatattggtggcaagcaggcgctggagacggtgcaggcgctgttgccggtgctgtgccaggcccacggcttgaccccggagcaggtggtggccatcgccagcaatattggtggcaagcaggcgctggagacggtgcaggcgctgttgccggtgctgtgccaggcccacggcttgaccccggagcaggtggtggccatcgccagccacgatggcggcaagcaggcgctggagacggtccagcggctgttgccggtgctgtgccaggcccacggcttgaccccggagcaggtggtggccatcgccagccacgatggcggcaagcaggcgctggagacggtccagcggctgttgccggtgctgtgccaggcccacggcttgaccccccagcaggtggtggccatcgccagcaatggcggtggcaagcaggcgctggagacggtccagcggctgttgccggtgctgtgccaggcccacggcttgaccccggagcaggtggtggccatcgccagcaatattggtggcaagcaggcgctggagacggtgcaggcgctgttgccggtgctgtgccaggcccacggcttgaccccggagcaggtggtggccatcgccagcaatattggtggcaagcaggcgctggagacggtgcaggcgctgttgccggtgctgtgccaggcccacggcttgaccccggagcaggtggtggccatcgccagccacgatggcggcaagcaggcgctggagacggtccagcggctgttgccggtgctgtgccaggcccacggcttgaccccggagcaggtggtggccatcgccagccacgatggcggcaagcaggcgctggagacggtccagcggctgttgccggtgctgtgccaggcccacggcttgaccccggagcaggtggtggccatcgccagccacgatggcggcaagcaggcgctggagacggtccagcggctgttgccggtgctgtgccaggcccacggcttgaccccccagcaggtggtggccatcgccagcaatggcggtggcaagcaggcgctggagacggtccagcggctgttgccggtgctgtgccaggcccacggcttgaccccggagcaggtggtggccatcgccagccacgatggcggcaagcaggcgctggagacggtccagcggctgttgccggtgctgtgccaggcccacggcttgacccctcagcaggtggtggccatcgccagcaatggcggcggcaggccggcgctggagagcattgttgcccagttatctcgccctgatccgtcggccgactgataagtcgaccaccaccaccaccaccactgataagagctcctcgagcctgcagcagctgaagctttggacttctggcgcgcccaattcgccctatagtgagtcgtattacgtcgcgctcactggccgtcgttttacaacgtcgtgactgggaaaaccctggcgttacccaacttaatcgccttgcagcacatccccctttcgccagctggcgtaatagcgaagaggcccgcaccgaaacgcccttcccaacagttgcgcagcctgaatggcgaatgggagcgccctgtagcggcgcattaagcgcggcgggtgtggtggttacgcgcagcgtgaccgctacacttgccagcgccctagcgcccgctcctttcgctttcttcccttcctttctcgccacgttcgccggctttccccgtcaagctctaaatcgggggctccctttagggttccgatttagtgctttacggcacctcgaccccaaaaaacttgattagggtgatggttggcctgtagtgggccatagccctgatagacggtttttcgccctttgacgttggagtccacgttctttaatagtggactcttgttccaaactggaacaacactcaaccctatctcggtctattcttttgatttataagggattttgccgatttcggcctattggttaaaaaatgagctgatttaacaaaaatttaacgcgaattttaacaaaatattaacgcttacaatttaggtggcacttttcggggaaatgtgcgcggaacccctatttgtttatttttctaaatacattcaaatatgtatccgctcatgagacaataaccctgataaatgcttcaataatattgaaaaaggaagagtatgagtattcaacatttccgtgtcgcccttattcccttttttgcggcattttgccttcctgtttttgctcacccagaaacgctggtgaaagtaaaagatgctgaagatcagttgggtgcacgagtgggttacatcgaactggatctcaacagcggtaagatccttgagagttttcgccccgaagaacgttttccaatgatgagcacttttaaagttctgctatgtggcgcggtattatcccgtattgacgccgggcaagagcaactcggtcgccgcatacactattctcagaatgacttggttgagtactcaccagtcacagaaaagcatcttacggatggcatgacagtaagagaattatgcagtgctgccataaccatgagtgataacactgcggccaacttacttctgacaacgatcggaggaccgaaggagctaaccgcttttttgcacaacatgggggatcatgtaactcgccttgatcgttgggaaccggagctgaatgaagccataccaaacgacgagcgtgacaccacgatgcctgtagcaatggcaacaacgttgcgcaaactattaactggcgaactacttactctagcttcccggcaacaattaatagactggatggaggcggataaagttgcaggaccacttctgcgctcggcccttccggctggctggtttattgctgataaatctggagccggtgagcgtggttctcgcggtatcattgcagcactggggccagatggtaagccctcccgtatcgtagttatctacacgacggggagtcaggcaactatggatgaacgaaatagacagatcgctgagataggtgcctcactgattaagcattggtaactgtcagaccaagtttactcatatatactttagattgatttaaaacttcatttttaatttaaaaggatctaggtgaagatcctttttgataatctcatgaccaaaatcccttaacgtgagttttcgttccactgagcgtcagaccccgtagaaaagatcaaaggatcttcttgagatcctttttttctgcgcgtaatctgctgcttgcaaacaaaaaaaccaccgctaccagcggtggtttgtttgccggatcaagagctaccaactctttttccgaaggtaactggcttcagcagagcgcagataccaaatactgttcttctagtgtagccgtagttaggccaccacttcaagaactctgtagcaccgcctacatacctcgctctgctaatcctgttaccagtggctgctgccagtggcgataagtcgtgtcttaccgggttggactcaagacgatagttaccggataaggcgcagcggtcgggctgaacggggggttcgtgcacacagcccagcttggagcgaacgacctacaccgaactgagatacctacagcgtgagctatgagaaagcgccacgcttcccgaagggagaaaggcggacaggtatccggtaagcggcagggtcggaacaggagagcgcacgagggagcttccagggggaaacgcctggtatctttatagtcctgtcgggtttcgccacctctgacttgagcgtcgatttttgtgatgctcgtcaggggggcggagcctatggaaaaacgccagcaacgcggcctttttacggttcctggccttttgctggccttttgctcacat

SEQ ID NO: 270 - DNA, 5840 bp, Artificial sequence
  pCLS15781
ggtctttcctgcgttatcccctgattctgtggataaccgtattaccgcctttgagtgagctgataccgctcgccgcagccgaacgaccgagcgcagcgagtcagtgagcgaggaagcggagagcgcccaatacgcaaaccgcctctccccgcgcgttggccgattcattaatgcagctggcacgacaggtttcccgactggaaagcgggcagtgagcgcaacgcaattaatgtgagttagctcactcattaggcaccccaggctttacactttatgcttccggctcgtatgttgtgtggaattgtgagcggataacaatttcacacaggaaacagctatgaccatgattacgccaagcgcgtcaattaaccctcactaaagggaacaaaagctgttaattaagcgcgccacacgcaaacacaaatacacagcggccttgccaccatggccaagtctggcatctaccagattaagaacaccctgaataacaaagtgtatgttggatctgccaaggactttgagaaaagatggaagaggcacttcaaggatctggaaaagggttgccacagctccatcaagctccaaaggtctttcaacaaacatggcaatgtctttgagtgctccattttggaagagatcccttatgaaaaggacctcattatagagagggaaaacttctggatcaaggagctgaactcaaaaatcaatggatacaacattgcagatgccacatttggtgacacctgttctactcacccccttaaggaagagatcattaaaaagaggtctgagactgtgaaggctaagatgttgaaactggggcctgatggcagaaaggcactctactctaagccaggtagcaaaaatggaaggtggaaccctgagacccacaagttctgcaaatgtggggtgagaatacagacatcagcctacacttgcagcaagtgtaggaacagatcaggagagaataactcctttttcaaccacaagcattctgacatcaccaagtccaaaatttcaggcaagatgaaaggtcaaggtccatccggagtggatctacgcacgctcggctacagccagcagcaacaggagaagatcaaaccgaaggttcgttcgacagtggcgcagcaccacgaggcactggtcggccacgggtttacacacgcgcacatcgttgcgttaagccaacacccggcagcgttagggaccgtcgctgtcaagtatcaggacatgatcgcagcgttgccagaggcgacacacgaagcgatcgttggcgtcggcaaacagtggtccggcgcacgcgctctggaggccttgctcacggtggcgggagagttgagaggtccaccgttacagttggacacaggccaacttctcaagattgcaaaacgtggcggcgtgaccgcagtggaggcagtgcatgcatggcgcaatgcactgacgggtgccccgctcaacttgaccccggagcaggtggtggccatcgccagccacgatggcggcaagcaggcgctggagacggtccagcggctgttgccggtgctgtgccaggcccacggcttgaccccccagcaggtggtggccatcgccagcaatggcggtggcaagcaggcgctggagacggtccagcggctgttgccggtgctgtgccaggcccacggcttgaccccggagcaggtggtggccatcgccagcaatattggtggcaagcaggcgctggagacggtgcaggcgctgttgccggtgctgtgccaggcccacggcttgaccccccagcaggtggtggccatcgccagcaatggcggtggcaagcaggcgctggagacggtccagcggctgttgccggtgctgtgccaggcccacggcttgaccccggagcaggtggtggccatcgccagcaatattggtggcaagcaggcgctggagacggtgcaggcgctgttgccggtgctgtgccaggcccacggcttgaccccggagcaggtggtggccatcgccagcaatattggtggcaagcaggcgctggagacggtgcaggcgctgttgccggtgctgtgccaggcccacggcttgaccccggagcaggtggtggccatcgccagcaatattggtggcaagcaggcgctggagacggtgcaggcgctgttgccggtgctgtgccaggcccacggcttgaccccggagcaggtggtggccatcgccagccacgatggcggcaagcaggcgctggagacggtccagcggctgttgccggtgctgtgccaggcccacggcttgaccccggagcaggtggtggccatcgccagccacgatggcggcaagcaggcgctggagacggtccagcggctgttgccggtgctgtgccaggcccacggcttgaccccccagcaggtggtggccatcgccagcaatggcggtggcaagcaggcgctggagacggtccagcggctgttgccggtgctgtgccaggcccacggcttgaccccggagcaggtggtggccatcgccagcaatattggtggcaagcaggcgctggagacggtgcaggcgctgttgccggtgctgtgccaggcccacggcttgaccccggagcaggtggtggccatcgccagcaatattggtggcaagcaggcgctggagacggtgcaggcgctgttgccggtgctgtgccaggcccacggcttgaccccggagcaggtggtggccatcgccagccacgatggcggcaagcaggcgctggagacggtccagcggctgttgccggtgctgtgccaggcccacggcttgaccccggagcaggtggtggccatcgccagccacgatggcggcaagcaggcgctggagacggtccagcggctgttgccggtgctgtgccaggcccacggcttgaccccggagcaggtggtggccatcgccagccacgatggcggcaagcaggcgctggagacggtccagcggctgttgccggtgctgtgccaggcccacggcttgaccccccagcaggtggtggccatcgccagcaatggcggtggcaagcaggcgctggagacggtccagcggctgttgccggtgctgtgccaggcccacggcttgaccccggagcaggtggtggccatcgccagccacgatggcggcaagcaggcgctggagacggtccagcggctgttgccggtgctgtgccaggcccacggcttgacccctcagcaggtggtggccatcgccagcaatggcggcggcaggccggcgctggagagcattgttgcccagttatctcgccctgatccgtcggccgactgataagtcgaccaccaccaccaccaccactgataagagctcctcgagcctgcagcagctgaagctttggacttctggcgcgcccaattcgccctatagtgagtcgtattacgtcgcgctcactggccgtcgttttacaacgtcgtgactgggaaaaccctggcgttacccaacttaatcgccttgcagcacatccccctttcgccagctggcgtaatagcgaagaggcccgcaccgaaacgcccttcccaacagttgcgcagcctgaatggcgaatgggagcgccctgtagcggcgcattaagcgcggcgggtgtggtggttacgcgcagcgtgaccgctacacttgccagcgccctagcgcccgctcctttcgctttcttcccttcctttctcgccacgttcgccggctttccccgtcaagctctaaatcgggggctccctttagggttccgatttagtgctttacggcacctcgaccccaaaaaacttgattagggtgatggttggcctgtagtgggccatagccctgatagacggtttttcgccctttgacgttggagtccacgttctttaatagtggactcttgttccaaactggaacaacactcaaccctatctcggtctattcttttgatttataagggattttgccgatttcggcctattggttaaaaaatgagctgatttaacaaaaatttaacgcgaattttaacaaaatattaacgcttacaatttaggtggcacttttcggggaaatgtgcgcggaacccctatttgtttatttttctaaatacattcaaatatgtatccgctcatgagacaataaccctgataaatgcttcaataatattgaaaaaggaagagtatgagtattcaacatttccgtgtcgcccttattcccttttttgcggcattttgccttcctgtttttgctcacccagaaacgctggtgaaagtaaaagatgctgaagatcagttgggtgcacgagtgggttacatcgaactggatctcaacagcggtaagatccttgagagttttcgccccgaagaacgttttccaatgatgagcacttttaaagttctgctatgtggcgcggtattatcccgtattgacgccgggcaagagcaactcggtcgccgcatacactattctcagaatgacttggttgagtactcaccagtcacagaaaagcatcttacggatggcatgacagtaagagaattatgcagtgctgccataaccatgagtgataacactgcggccaacttacttctgacaacgatcggaggaccgaaggagctaaccgcttttttgcacaacatgggggatcatgtaactcgccttgatcgttgggaaccggagctgaatgaagccataccaaacgacgagcgtgacaccacgatgcctgtagcaatggcaacaacgttgcgcaaactattaactggcgaactacttactctagcttcccggcaacaattaatagactggatggaggcggataaagttgcaggaccacttctgcgctcggcccttccggctggctggtttattgctgataaatctggagccggtgagcgtggttctcgcggtatcattgcagcactggggccagatggtaagccctcccgtatcgtagttatctacacgacggggagtcaggcaactatggatgaacgaaatagacagatcgctgagataggtgcctcactgattaagcattggtaactgtcagaccaagtttactcatatatactttagattgatttaaaacttcatttttaatttaaaaggatctaggtgaagatcctttttgataatctcatgaccaaaatcccttaacgtgagttttcgttccactgagcgtcagaccccgtagaaaagatcaaaggatcttcttgagatcctttttttctgcgcgtaatctgctgcttgcaaacaaaaaaaccaccgctaccagcggtggtttgtttgccggatcaagagctaccaactctttttccgaaggtaactggcttcagcagagcgcagataccaaatactgttcttctagtgtagccgtagttaggccaccacttcaagaactctgtagcaccgcctacatacctcgctctgctaatcctgttaccagtggctgctgccagtggcgataagtcgtgtcttaccgggttggactcaagacgatagttaccggataaggcgcagcggtcgggctgaacggggggttcgtgcacacagcccagcttggagcgaacgacctacaccgaactgagatacctacagcgtgagctatgagaaagcgccacgcttcccgaagggagaaaggcggacaggtatccggtaagcggcagggtcggaacaggagagcgcacgagggagcttccagggggaaacgcctggtatctttatagtcctgtcgggtttcgccacctctgacttgagcgtcgatttttgtgatgctcgtcaggggggcggagcctatggaaaaacgccagcaacgcggcctttttacggttcctggccttttgctggccttttgctcacat

SEQ ID NO: 271 - DNA, 1614 bp, Artificial sequence
  RagT2-R RVD insert
gcagcctcaacttgaccccccagcaggtggtggccatcgccagcaataatggtggcaagcaggcgctggagacggtccagcggctgttgccggtgctgtgccaggcccacggcttgaccccccagcaggtggtggccatcgccagcaatggcggtggcaagcaggcgctggagacggtccagcggctgttgccggtgctgtgccaggcccacggcttgaccccccagcaggtggtggccatcgccagcaatggcggtggcaagcaggcgctggagacggtccagcggctgttgccggtgctgtgccaggcccacggcttgaccccccagcaggtggtggccatcgccagcaatggcggtggcaagcaggcgctggagacggtccagcggctgttgccggtgctgtgccaggcccacggcttgaccccggagcaggtggtggccatcgccagcaatattggtggcaagcaggcgctggagacggtgcaggcgctgttgccggtgctgtgccaggcccacggcttgaccccccagcaggtggtggccatcgccagcaatggcggtggcaagcaggcgctggagacggtccagcggctgttgccggtgctgtgccaggcccacggcttgaccccccagcaggtggtggccatcgccagcaataatggtggcaagcaggcgctggagacggtccagcggctgttgccggtgctgtgccaggcccacggcttgaccccccagcaggtggtggccatcgccagcaataatggtggcaagcaggcgctggagacggtccagcggctgttgccggtgctgtgccaggcccacggcttgaccccccagcaggtggtggccatcgccagcaatggcggtggcaagcaggcgctggagacggtccagcggctgttgccggtgctgtgccaggcccacggcttgaccccccagcaggtggtggccatcgccagcaatggcggtggcaagcaggcgctggagacggtccagcggctgttgccggtgctgtgccaggcccacggcttgaccccggagcaggtggtggccatcgccagcaatattggtggcaagcaggcgctggagacggtgcaggcgctgttgccggtgctgtgccaggcccacggcttgaccccggagcaggtggtggccatcgccagccacgatggcggcaagcaggcgctggagacggtccagcggctgttgccggtgctgtgccaggcccacggcttgaccccccagcaggtggtggccatcgccagcaatggcggtggcaagcaggcgctggagacggtccagcggctgttgccggtgctgtgccaggcccacggcttgaccccccagcaggtggtggccatcgccagcaatggcggtggcaagcaggcgctggagacggtccagcggctgttgccggtgctgtgccaggcccacggcttgaccccggagcaggtggtggccatcgccagcaatattggtggcaagcaggcgctggagacggtgcaggcgctgttgccggtgctgtgccaggcccacggcttgacccctcagcaggtggtggccatcgccagcaatggcggcggcaggccggcgctggagagcattgtgatgc

SEQ ID NO: 272 - DNA, 5417 bp, Artificial sequence
  pCLS15782
ggtctttcctgcgttatcccctgattctgtggataaccgtattaccgcctttgagtgagctgataccgctcgccgcagccgaacgaccgagcgcagcgagtcagtgagcgaggaagcggagagcgcccaatacgcaaaccgcctctccccgcgcgttggccgattcattaatgcagctggcacgacaggtttcccgactggaaagcgggcagtgagcgcaacgcaattaatgtgagttagctcactcattaggcaccccaggctttacactttatgcttccggctcgtatgttgtgtggaattgtgagcggataacaatttcacacaggaaacagctatgaccatgattacgccaagcgcgtcaattaaccctcactaaagggaacaaaagctgttaattaagcgcgccacacgcaaacacaaatacacagcggccttgccaccatggccaagtctggcatctaccagattaagaacaccctgaataacaaagtgtatgttggatctgccaaggactttgagaaaagatggaagaggcacttcaaggatctggaaaagggttgccacagctccatcaagctccaaaggtctttcaacaaacatggcaatgtctttgagtgctccattttggaagagatcccttatgaaaaggacctcattatagagagggaaaacttctggatcaaggagctgaactcaaaaatcaatggatacaacattgcagatgccacatttggtgacacctgttctactcacccccttaaggaagagatcattaaaaagaggtctgagactgtgaaggctaagatgttgaaacaaggtccatccggagtggatctacgcacgctcggctacagccagcagcaacaggagaagatcaaaccgaaggttcgttcgacagtggcgcagcaccacgaggcactggtcggccacgggtttacacacgcgcacatcgttgcgttaagccaacacccggcagcgttagggaccgtcgctgtcaagtatcaggacatgatcgcagcgttgccagaggcgacacacgaagcgatcgttggcgtcggcaaacagtggtccggcgcacgcgctctggaggccttgctcacggtggcgggagagttgagaggtccaccgttacagttggacacaggccaacttctcaagattgcaaaacgtggcggcgtgaccgcagtggaggcagtgcatgcatggcgcaatgcactgacgggtgccccgctcaacttgaccccccagcaggtggtggccatcgccagcaataatggtggcaagcaggcgctggagacggtccagcggctgttgccggtgctgtgccaggcccacggcttgaccccccagcaggtggtggccatcgccagcaatggcggtggcaagcaggcgctggagacggtccagcggctgttgccggtgctgtgccaggcccacggcttgaccccccagcaggtggtggccatcgccagcaatggcggtggcaagcaggcgctggagacggtccagcggctgttgccggtgctgtgccaggcccacggcttgaccccccagcaggtggtggccatcgccagcaatggcggtggcaagcaggcgctggagacggtccagcggctgttgccggtgctgtgccaggcccacggcttgaccccggagcaggtggtggccatcgccagcaatattggtggcaagcaggcgctggagacggtgcaggcgctgttgccggtgctgtgccaggcccacggcttgaccccccagcaggtggtggccatcgccagcaatggcggtggcaagcaggcgctggagacggtccagcggctgttgccggtgctgtgccaggcccacggcttgaccccccagcaggtggtggccatcgccagcaataatggtggcaagcaggcgctggagacggtccagcggctgttgccggtgctgtgccaggcccacggcttgaccccccagcaggtggtggccatcgccagcaataatggtggcaagcaggcgctggagacggtccagcggctgttgccggtgctgtgccaggcccacggcttgaccccccagcaggtggtggccatcgccagcaatggcggtggcaagcaggcgctggagacggtccagcggctgttgccggtgctgtgccaggcccacggcttgaccccccagcaggtggtggccatcgccagcaatggcggtggcaagcaggcgctggagacggtccagcggctgttgccggtgctgtgccaggcccacggcttgaccccggagcaggtggtggccatcgccagcaatattggtggcaagcaggcgctggagacggtgcaggcgctgttgccggtgctgtgccaggcccacggcttgaccccggagcaggtggtggccatcgccagccacgatggcggcaagcaggcgctggagacggtccagcggctgttgccggtgctgtgccaggcccacggcttgaccccccagcaggtggtggccatcgccagcaatggcggtggcaagcaggcgctggagacggtccagcggctgttgccggtgctgtgccaggcccacggcttgaccccccagcaggtggtggccatcgccagcaatggcggtggcaagcaggcgctggagacggtccagcggctgttgccggtgctgtgccaggcccacggcttgaccccggagcaggtggtggccatcgccagcaatattggtggcaagcaggcgctggagacggtgcaggcgctgttgccggtgctgtgccaggcccacggcttgacccctcagcaggtggtggccatcgccagcaatggcggcggcaggccggcgctggagagcattgttgcccagttatctcgccctgatccgtcggccgactgataagtcgaccaccaccaccaccaccactgataagagctcctcgagcctgcagcagctgaagctttggacttctggcgcgcccaattcgccctatagtgagtcgtattacgtcgcgctcactggccgtcgttttacaacgtcgtgactgggaaaaccctggcgttacccaacttaatcgccttgcagcacatccccctttcgccagctggcgtaatagcgaagaggcccgcaccgaaacgcccttcccaacagttgcgcagcctgaatggcgaatgggagcgccctgtagcggcgcattaagcgcggcgggtgtggtggttacgcgcagcgtgaccgctacacttgccagcgccctagcgcccgctcctttcgctttcttcccttcctttctcgccacgttcgccggctttccccgtcaagctctaaatcgggggctccctttagggttccgatttagtgctttacggcacctcgaccccaaaaaacttgattagggtgatggttggcctgtagtgggccatagccctgatagacggtttttcgccctttgacgttggagtccacgttctttaatagtggactcttgttccaaactggaacaacactcaaccctatctcggtctattcttttgatttataagggattttgccgatttcggcctattggttaaaaaatgagctgatttaacaaaaatttaacgcgaattttaacaaaatattaacgcttacaatttaggtggcacttttcggggaaatgtgcgcggaacccctatttgtttatttttctaaatacattcaaatatgtatccgctcatgagacaataaccctgataaatgcttcaataatattgaaaaaggaagagtatgagtattcaacatttccgtgtcgcccttattcccttttttgcggcattttgccttcctgtttttgctcacccagaaacgctggtgaaagtaaaagatgctgaagatcagttgggtgcacgagtgggttacatcgaactggatctcaacagcggtaagatccttgagagttttcgccccgaagaacgttttccaatgatgagcacttttaaagttctgctatgtggcgcggtattatcccgtattgacgccgggcaagagcaactcggtcgccgcatacactattctcagaatgacttggttgagtactcaccagtcacagaaaagcatcttacggatggcatgacagtaagagaattatgcagtgctgccataaccatgagtgataacactgcggccaacttacttctgacaacgatcggaggaccgaaggagctaaccgcttttttgcacaacatgggggatcatgtaactcgccttgatcgttgggaaccggagctgaatgaagccataccaaacgacgagcgtgacaccacgatgcctgtagcaatggcaacaacgttgcgcaaactattaactggcgaactacttactctagcttcccggcaacaattaatagactggatggaggcggataaagttgcaggaccacttctgcgctcggcccttccggctggctggtttattgctgataaatctggagccggtgagcgtggttctcgcggtatcattgcagcactggggccagatggtaagccctcccgtatcgtagttatctacacgacggggagtcaggcaactatggatgaacgaaatagacagatcgctgagataggtgcctcactgattaagcattggtaactgtcagaccaagtttactcatatatactttagattgatttaaaacttcatttttaatttaaaaggatctaggtgaagatcctttttgataatctcatgaccaaaatcccttaacgtgagttttcgttccactgagcgtcagaccccgtagaaaagatcaaaggatcttcttgagatcctttttttctgcgcgtaatctgctgcttgcaaacaaaaaaaccaccgctaccagcggtggtttgtttgccggatcaagagctaccaactctttttccgaaggtaactggcttcagcagagcgcagataccaaatactgttcttctagtgtagccgtagttaggccaccacttcaagaactctgtagcaccgcctacatacctcgctctgctaatcctgttaccagtggctgctgccagtggcgataagtcgtgtcttaccgggttggactcaagacgatagttaccggataaggcgcagcggtcgggctgaacggggggttcgtgcacacagcccagcttggagcgaacgacctacaccgaactgagatacctacagcgtgagctatgagaaagcgccacgcttcccgaagggagaaaggcggacaggtatccggtaagcggcagggtcggaacaggagagcgcacgagggagcttccagggggaaacgcctggtatctttatagtcctgtcgggtttcgccacctctgacttgagcgtcgatttttgtgatgctcgtcaggggggcggagcctatggaaaaacgccagcaacgcggcctttttacggttcctggccttttgctggccttttgctcacat

SEQ ID NO: 273 - DNA, 11157 bp, Artificial sequence
  pCLS11979
atgtgagcaaaaggccagcaaaaggccaggaaccgtaaaaaggccgcgttgctggcgtttttccataggctccgcccccctgacgagcatcacaaaaatcgacgctcaagtcagaggtggcgaaacccgacaggactataaagataccaggcgtttccccctggaagctccctcgtgcgctctcctgttccgaccctgccgcttaccggatacctgtccgcctttctcccttcgggaagcgtggcgctttctcatagctcacgctgtaggtatctcagttcggtgtaggtcgttcgctccaagctgggctgtgtgcacgaaccccccgttcagcccgaccgctgcgccttatccggtaactatcgtcttgagtccaacccggtaagacacgacttatcgccactggcagcagccactggtaacaggattagcagagcgaggtatgtaggcggtgctacagagttcttgaagtggtggcctaactacggctacactagaaggacagtatttggtatctgcgctctgctgaagccagttaccttcggaaaaagagttggtagctcttgatccggcaaacaaaccaccgctggtagcggtggtttttttgtttgcaagcagcagattacgcgcagaaaaaaaggatctcaagaagatcctttgatcttttctacggggtctgacgctcagtggaacgaaaactcacgttaagggattttggtcatgagattatcaaaaaggatcttcacctagatccttttaaattaaaaatgaagttttaaatcaatctaaagtatatatgagtaaacttggtctgacagttaccaatgcttaatcagtgaggcacctatctcagcgatctgtctatttcgttcatccatagttgcctgactccccgtcgtgtagataactacgatacgggagggcttaccatctggccccagtgctgcaatgataccgcgagacccacgctcaccggctccagatttatcagcaataaaccagccagccggaagggccgagcgcagaagtggtcctgcaactttatccgcctccatccagtctattaattgttgccgggaagctagagtaagtagttcgccagttaatagtttgcgcaacgttgttgccattgctacaggcatcgtggtgtcacgctcgtcgtttggtatggcttcattcagctccggttcccaacgatcaaggcgagttacatgatcccccatgttgtgcaaaaaagcggttagctccttcggtcctccgatcgttgtcagaagtaagttggccgcagtgttatcactcatggttatggcagcactgcataattctcttactgtcatgccatccgtaagatgcttttctgtgactggtgagtactcaaccaagtcattctgagaatagtgtatgcggcgaccgagttgctcttgcccggcgtcaatacgggataataccgcgccacatagcagaactttaaaagtgctcatcattggaaaacgttcttcggggcgaaaactctcaaggatcttaccgctgttgagatccagttcgatgtaacccactcgtgcacccaactgatcttcagcatcttttactttcaccagcgtttctgggtgagcaaaaacaggaaggcaaaatgccgcaaaaaagggaataagggcgacacggaaatgttgaatactcatactcttcctttttcaatattattgaagcatttatcagggttattgtctcatgagcggatacatatttgaatgtatttagaaaaataaacaaataggggttccgcgcacatttccccgaaaagtgccacctgacgtccgatcaaaaatcatcgcttcgctgattaattaccccagaaataaggctaaaaaactaatcgcattatcatcctatggttgttaatttgattcgttcatttgaaggtttgtggggccaggttactgccaatttttcctcttcataaccataaaagctagtattgtagaatctttattgttcggagcagtgcggcgcgaggcacatctgcgtttcaggaacgcgaccggtgaagacgaggacgcacggaggagagtcttccttcggagggctgtcacccgctcggcggcttctaatccgtacttcaatatagcaatgagcagttaagcgtattactgaaagttccaaagagaaggtttttttaggctaatcgacctcgagcagatccgccaggcgtgtatatagcgtggatggccaggcaactttagtgctgacacatacaggcatatatatatgtgtgcgacgacacatgatcatatggcatgcatgtgctctgtatgtatataaaactcttgttttcttcttttctctaaatattctttccttatacattaggtcctttgtagcataaattactatacttctatagacacgcaaacacaaatacacagcggccttgccaccatggccaagtctggcatctaccagattaagaacaccctgaataacaaagtgtatgttggatctgccaaggactttgagaaaagatggaagaggcacttcaaggatctggaaaagggttgccacagctccatcaagctccaaaggtctttcaacaaacatggcaatgtctttgagtgctccattttggaagagatcccttatgaaaaggacctcattatagagagggaaaacttctggatcaaggagctgaactcaaaaatcaatggatacaacattgcagatgccacatttggtgacacctgttctactcacccccttaaggaagagatcattaaaaagaggtctgagactgtgaaggctaagatgttgaaactggggcctgatggcagaaaggcactctactctaagccaggtagcaaaaatggaaggtggaaccctgagacccacaagttctgcaaatgtggggtgagaatacagacatcagcctacacttgcagcaagtgtaggaacagatcaggagagaataactcctttttcaaccacaagcattctgacatcaccaagtccaaaatttcaggcaagatgaaaggtaagaaaccatctaactccggagtggatctacgcacgctcggctacagccagcagcaacaggagaagatcaaaccgaaggttcgttcgacagtggcgcagcaccacgaggcactggtcggccacgggtttacacacgcgcacatcgttgcgttaagccaacacccggcagcgttagggaccgtcgctgtcaagtatcaggacatgatcgcagcgttgccagaggcgacacacgaagcgatcgttggcgtcggcaaacagtggtccggcgcacgcgctctggaggccttgctcacggtggcgggagagttgagaggtccaccgttacagttggacacaggccaacttctcaagattgcaaaacgtggcggcgtgaccgcagtggaggcagtgcatgcatggcgcaatgcactgacgggtgccccgctcaacttgaccccggagcaggtggtggccatcgccagccacgatggcggcaagcaggcgctggagacggtccagcggctgttgccggtgctgtgccaggcccacggcttgaccccccagcaggtggtggccatcgccagcaatggcggtggcaagcaggcgctggagacggtccagcggctgttgccggtgctgtgccaggcccacggcttgaccccggagcaggtggtggccatcgccagcaatattggtggcaagcaggcgctggagacggtgcaggcgctgttgccggtgctgtgccaggcccacggcttgaccccccagcaggtggtggccatcgccagcaatggcggtggcaagcaggcgctggagacggtccagcggctgttgccggtgctgtgccaggcccacggcttgaccccggagcaggtggtggccatcgccagcaatattggtggcaagcaggcgctggagacggtgcaggcgctgttgccggtgctgtgccaggcccacggcttgaccccggagcaggtggtggccatcgccagcaatattggtggcaagcaggcgctggagacggtgcaggcgctgttgccggtgctgtgccaggcccacggcttgaccccggagcaggtggtggccatcgccagcaatattggtggcaagcaggcgctggagacggtgcaggcgctgttgccggtgctgtgccaggcccacggcttgaccccggagcaggtggtggccatcgccagccacgatggcggcaagcaggcgctggagacggtccagcggctgttgccggtgctgtgccaggcccacggcttgaccccggagcaggtggtggccatcgccagccacgatggcggcaagcaggcgctggagacggtccagcggctgttgccggtgctgtgccaggcccacggcttgaccccccagcaggtggtggccatcgccagcaatggcggtggcaagcaggcgctggagacggtccagcggctgttgccggtgctgtgccaggcccacggcttgaccccggagcaggtggtggccatcgccagcaatattggtggcaagcaggcgctggagacggtgcaggcgctgttgccggtgctgtgccaggcccacggcttgaccccggagcaggtggtggccatcgccagcaatattggtggcaagcaggcgctggagacggtgcaggcgctgttgccggtgctgtgccaggcccacggcttgaccccggagcaggtggtggccatcgccagccacgatggcggcaagcaggcgctggagacggtccagcggctgttgccggtgctgtgccaggcccacggcttgaccccggagcaggtggtggccatcgccagccacgatggcggcaagcaggcgctggagacggtccagcggctgttgccggtgctgtgccaggcccacggcttgaccccggagcaggtggtggccatcgccagccacgatggcggcaagcaggcgctggagacggtccagcggctgttgccggtgctgtgccaggcccacggcttgaccccccagcaggtggtggccatcgccagcaatggcggtggcaagcaggcgctggagacggtccagcggctgttgccggtgctgtgccaggcccacggcttgaccccggagcaggtggtggccatcgccagccacgatggcggcaagcaggcgctggagacggtccagcggctgttgccggtgctgtgccaggcccacggcttgacccctcagcaggtggtggccatcgccagcaatggcggcggcaggccggcgctggagagcattgttgcccagttatctcgccctgatccgtcggccgactgataactcgagcgatcctctagacgagctcctcgagcctgcagcagctgaagctttggacttcttcgccagaggtttggtcaagtctccaatcaaggttgtcggcttgtctaccttgccagaaatttacgaaaagatggaaaagggtcaaatcgttggtagatacgttgttgacacttctaaataagcgaatttcttatgatttatgatttttattattaaataagttataaaaaaaataagtgtatacaaattttaaagtgactcttaggttttaaaacgaaaattcttattcttgagtaactctttcctgtaggtcaggttgctttctcaggtatagcatgaggtcgctcttattgaccacacctctaccggcatgcaagcttggcgtaatcatggtcatagctgtttcctgtgtgaaattgttatccgctcacaattccacacaacatacgagccggaagcataaagtgtaaagcctggggtgcctaatgagtgagctaactcacattaattgcgttgcgctcactgcccgctttccagtcgggaaacctgtcgtgccagcagatctattacattatgggtggtatgttggaataaaaatcaactatcatctactaactagtatttacgttactagtatattatcatatacggtgttagaagatgacgcaaatgatgagaaatagtcatctaaattagtggaagctgaaacgcaaggattgataatgtaataggatcaatgaatattaacatataaaatgatgataataatatttatagaattgtgtagaattgcagattcccttttatggattcctaaatcctcgaggagaacttctagtatatctacatacctaatattattgccttattaaaaatggaatcccaacaattacatcaaaatccacattctcttcaaaatcaattgtcctgtacttccttgttcatgtgtgttcaaaaacgttatatttataggataattatactctatttctcaacaagtaattggttgtttggccgagcggtctaaggcgcctgattcaagaaatatcttgaccgcagttaactgtgggaatactcaggtatcgtaagatgcaagagttcgaatctcttagcaaccattatttttttcctcaacataacgagaacacacaggggcgctatcgcacagaatcaaattcgatgactggaaattttttgttaatttcagaggtcgcctgacgcatatacctttttcaactgaaaaattgggagaaaaaggaaaggtgagagccgcggaaccggcttttcatatagaatagagaagcgttcatgactaaatgcttgcatcacaatacttgaagttgacaatattatttaaggacctattgttttttccaataggtggttagcaatcgtcttactttctaacttttcttaccttttacatttcagcaatatatatatatatatttcaaggatataccattctaatgtctgcccctaagaagatcgtcgttttgccaggtgaccacgttggtcaagaaatcacagccgaagccattaaggttcttaaagctatttctgatgttcgttccaatgtcaagttcgatttcgaaaatcatttaattggtggtgctgctatcgatgctacaggtgtcccacttccagatgaggcgctggaagcctccaagaaggttgatgccgttttgttaggtgctgtgggtggtcctaaatggggtaccggtagtgttagacctgaacaaggtttactaaaaatccgtaaagaacttcaattgtacgccaacttaagaccatgtaactttgcatccgactctcttttagacttatctccaatcaagccacaatttgctaaaggtactgacttcgttgttgtcagagaattagtgggaggtatttactttggtaagagaaaggaagacgatggtgatggtgtcgcttgggatagtgaacaatacaccgttccagaagtgcaaagaatcacaagaatggccgctttcatggccctacaacatgagccaccattgcctatttggtccttggataaagctaatgttttggcctcttcaagattatggagaaaaactgtggaggaaaccatcaagaacgaattccctacattgaaggttcaacatcaattgattgattctgccgccatgatcctagttaagaacccaacccacctaaatggtattataatcaccagcaacatgtttggtgatatcatctccgatgaagcctccgttatcccaggttccttgggtttgttgccatctgcgtccttggcctctttgccagacaagaacaccgcatttggtttgtacgaaccatgccacggttctgctccagatttgccaaagaataaggtcaaccctatcgccactatcttgtctgctgcaatgatgttgaaattgtcattgaacttgcctgaagaaggtaaggccattgaagatgcagttaaaaaggttttggatgcaggtatcagaactggtgatttaggtggttccaacagtaccacggaagtcggtgatgctgtcgccgaagaagttaagaaaatccttgcttaaaaagattctctttttttatgatatttgtacataaactttataaatgaaattcataatagaaacgacacgaaattacaaaatggaatatgttcatagggtagacgaaactatatacgcaatctacatacatttatcaagaaggagaaaaaggaggatgtaaaggaatacaggtaagcaaattgatactaatggctcaacgtgataaggaaaaagaattgcactttaacattaatattgacaaggaggagggcaccacacaaaaagttaggtgtaacagaaaatcatgaaactatgattcctaatttatatattggaggattttctctaaaaaaaaaaaaatacaacaaataaaaaacactcaatgacctgaccatttgatggagtttaagtcaataccttcttgaaccatttcccataatggtgaaagttccctcaagaattttactctgtcagaaacggccttaacgacgtagtcgacctcctcttcagtactaaatctaccaataccaaatctgatggaagaatgggctaatgcatcatccttacccagcgcatgtaaaacataagaaggttctagggaagcagatgtacaggctgaacccgaggataatgcgatatcccttagtgccatcaataaagattctccttccacgtaggcgaaagaaacgttaacacaccctggataacgatgatctggagatccgttcaacgtggtatgttcagcggataatagacctttgactaatttatcggatagtcttttgatgtgagcttggtcgttgtcaaattctttcttcatcaatctcgcagcttcaccaaatcccgctaccaatgggggggccaaagtaccagatctgctgcattaatgaatcggccaacgcgcggggagaggcggtttgcgtattgggcgctcttccgcttcctcgctcactgactcgctgcgctcggtcgttcggctgcggcgagcggtatcagcatcgatgaattccacggactatagactatactagtatactccgtctactgtacgatacacttccgctcaggtccttgtcctttaacgaggccttaccactcttttgttactctattgatccagctcagcaaaggcagtgtgatctaagattctatcttcgcgatgtagtaaaactagctagaccgagaaagagactagaaatgcaaaaggcacttctacaatggctgccatcattattatccgatgtgacgctgcagcttctcaatgatattcgaatacgctttgaggagatacagcctaatatccgacaaactgttttacagatttacgatcgtacttgttacccatcattgaattttgaacatccgaacctgggagttttccctgaaacagatagtatatttgaacctgtataataatatatagtctagcgctttacggaagacaatgtatgtatttcggttcctggagaaactattgcatctattgcataggtaatcttgcacgtcgcatccccggttcattttctgcgtttccatcttgcacttcaatagcatatctttgttaacgaagcatctgtgcttcattttgtagaacaaaaatgcaacgcgagagcgctaatttttcaaacaaagaatctgagctgcatttttacagaacagaaatgcaacgcgaaagcgctattttaccaacgaagaatctgtgcttcatttttgtaaaacaaaaatgcaacgcgagagcgctaatttttcaaacaaagaatctgagctgcatttttacagaacagaaatgcaacgcgagagcgctattttaccaacaaagaatctatacttcttttttgttctacaaaaatgcatcccgagagcgctatttttctaacaaagcatcttagattactttttttctcctttgtgcgctctataatgcagtctcttgataactttttgcactgtaggtccgttaaggttagaagaaggctactttggtgtctattttctcttccataaaaaaagcctgactccacttcccgcgtttactgattactagcgaagctgcgggtgcattttttcaagataaaggcatccccgattatattctataccgatgtggattgcgcatactttgtgaacagaaagtgatagcgttgatgattcttcattggtcagaaaattatgaacggtttcttctattttgtctctatatactacgtataggaaatgtttacattttcgtattgttttcgattcactctatgaatagttcttactacaatttttttgtctaaagagtaatactagagataaacataaaaaatgtagaggtcgagtttagatgcaagttcaaggagcgaaaggtggatgggtaggttatatagggatatagcacagagatatatagcaaagagatacttttgagcaatgtttgtggaagcggtattcgcaatattttagtagctcgttacagtccggtgcgtttttggttttttgaaagtgcgtcttcagagcgcttttggttttcaaaagcgctctgaagttcctatactttctagagaataggaacttcggaataggaacttcaaagcgtttccgaaaacgagcgcttccgaaaatgcaacgcgagctgcgcacatacagctcactgttcacgtcgcacctatatctgcgtgttgcctgtatatatatatacatgagaagaacggcatagtgcgtgtttatgcttaaatgcgtacttatatgcgtctatttatgtaggatgaaaggtagtctagtacctcctgtgatattatcccattccatgcggggtatcgtatgcttccttcagcactaccctttagctgttctatatgctgccactcctcaattggattagtctcatccttcaatgctatcatttcctttgatattggatcatatgcatagtaccgagaaactagtgcgaagtagtgatcaggtattgctgttatctgatgagtatacgttgtcctggccacggcagaagcacgcttatcgctccaatttcccacaacattagtcaactccgttaggcccttcattgaaagaaatgaggtcatcaaatgtcttccaatgtgagattttgggccattttttatagcaaagattgaataaggcgcatttttcttcaaagctttattgtacgatctgactaagttatcttttaataattggtattcctgtttattgcttgaagaattgccggtcctatttactcgttttaggactggttcagaattcatcgatgctcactcaaaggtcggtaatacggttatccacagaatcaggggataacgcaggaaagaac

SEQ ID NO: 274 - DNA, 11151 bp, Artificial sequence
  pCLS8521
atgtgagcaaaaggccagcaaaaggccaggaaccgtaaaaaggccgcgttgctggcgtttttccataggctccgcccccctgacgagcatcacaaaaatcgacgctcaagtcagaggtggcgaaacccgacaggactataaagataccaggcgtttccccctggaagctccctcgtgcgctctcctgttccgaccctgccgcttaccggatacctgtccgcctttctcccttcgggaagcgtggcgctttctcatagctcacgctgtaggtatctcagttcggtgtaggtcgttcgctccaagctgggctgtgtgcacgaaccccccgttcagcccgaccgctgcgccttatccggtaactatcgtcttgagtccaacccggtaagacacgacttatcgccactggcagcagccactggtaacaggattagcagagcgaggtatgtaggcggtgctacagagttcttgaagtggtggcctaactacggctacactagaaggacagtatttggtatctgcgctctgctgaagccagttaccttcggaaaaagagttggtagctcttgatccggcaaacaaaccaccgctggtagcggtggtttttttgtttgcaagcagcagattacgcgcagaaaaaaaggatctcaagaagatcctttgatcttttctacggggtctgacgctcagtggaacgaaaactcacgttaagggattttggtcatgagattatcaaaaaggatcttcacctagatccttttaaattaaaaatgaagttttaaatcaatctaaagtatatatgagtaaacttggtctgacagttaccaatgcttaatcagtgaggcacctatctcagcgatctgtctatttcgttcatccatagttgcctgactccccgtcgtgtagataactacgatacgggagggcttaccatctggccccagtgctgcaatgataccgcgagacccacgctcaccggctccagatttatcagcaataaaccagccagccggaagggccgagcgcagaagtggtcctgcaactttatccgcctccatccagtctattaattgttgccgggaagctagagtaagtagttcgccagttaatagtttgcgcaacgttgttgccattgctacaggcatcgtggtgtcacgctcgtcgtttggtatggcttcattcagctccggttcccaacgatcaaggcgagttacatgatcccccatgttgtgcaaaaaagcggttagctccttcggtcctccgatcgttgtcagaagtaagttggccgcagtgttatcactcatggttatggcagcactgcataattctcttactgtcatgccatccgtaagatgcttttctgtgactggtgagtactcaaccaagtcattctgagaatagtgtatgcggcgaccgagttgctcttgcccggcgtcaatacgggataataccgcgccacatagcagaactttaaaagtgctcatcattggaaaacgttcttcggggcgaaaactctcaaggatcttaccgctgttgagatccagttcgatgtaacccactcgtgcacccaactgatcttcagcatcttttactttcaccagcgtttctgggtgagcaaaaacaggaaggcaaaatgccgcaaaaaagggaataagggcgacacggaaatgttgaatactcatactcttcctttttcaatattattgaagcatttatcagggttattgtctcatgagcggatacatatttgaatgtatttagaaaaataaacaaataggggttccgcgcacatttccccgaaaagtgccacctgacgtccgatcaaaaatcatcgcttcgctgattaattaccccagaaataaggctaaaaaactaatcgcattatcatcctatggttgttaatttgattcgttcatttgaaggtttgtggggccaggttactgccaatttttcctcttcataaccataaaagctagtattgtagaatctttattgttcggagcagtgcggcgcgaggcacatctgcgtttcaggaacgcgaccggtgaagacgaggacgcacggaggagagtcttccttcggagggctgtcacccgctcggcggcttctaatccgtacttcaatatagcaatgagcagttaagcgtattactgaaagttccaaagagaaggtttttttaggctaatcgacctcgagcagatccgccaggcgtgtatatagcgtggatggccaggcaactttagtgctgacacatacaggcatatatatatgtgtgcgacgacacatgatcatatggcatgcatgtgctctgtatgtatataaaactcttgttttcttcttttctctaaatattctttccttatacattaggtcctttgtagcataaattactatacttctatagacacgcaaacacaaatacacagcggccttgccaccatggccaagtctggcatctaccagattaagaacaccctgaataacaaagtgtatgttggatctgccaaggactttgagaaaagatggaagaggcacttcaaggatctggaaaagggttgccacagctccatcaagctccaaaggtctttcaacaaacatggcaatgtctttgagtgctccattttggaagagatcccttatgaaaaggacctcattatagagagggaaaacttctggatcaaggagctgaactcaaaaatcaatggatacaacattgcagatgccacatttggtgacacctgttctactcacccccttaaggaagagatcattaaaaagaggtctgagactgtgaaggctaagatgttgaaactggggcctgatggcagaaaggcactctactctaagccaggtagcaaaaatggaaggtggaaccctgagacccacaagttctgcaaatgtggggtgagaatacagacatcagcctacacttgcagcaagtgtaggaacagatcaggagagaataactcctttttcaaccacaagcattctgacatcaccaagtccaaaatttcaggcaagatgaaaggtcaaggtccatccggagtggatctacgcacgctcggctacagccagcagcaacaggagaagatcaaaccgaaggttcgttcgacagtggcgcagcaccacgaggcactggtcggccacgggtttacacacgcgcacatcgttgcgttaagccaacacccggcagcgttagggaccgtcgctgtcaagtatcaggacatgatcgcagcgttgccagaggcgacacacgaagcgatcgttggcgtcggcaaacagtggtccggcgcacgcgctctggaggccttgctcacggtggcgggagagttgagaggtccaccgttacagttggacacaggccaacttctcaagattgcaaaacgtggcggcgtgaccgcagtggaggcagtgcatgcatggcgcaatgcactgacgggtgccccgctcaacttgaccccggagcaggtggtggccatcgccagccacgatggcggcaagcaggcgctggagacggtccagcggctgttgccggtgctgtgccaggcccacggcttgaccccccagcaggtggtggccatcgccagcaatggcggtggcaagcaggcgctggagacggtccagcggctgttgccggtgctgtgccaggcccacggcttgaccccggagcaggtggtggccatcgccagcaatattggtggcaagcaggcgctggagacggtgcaggcgctgttgccggtgctgtgccaggcccacggcttgaccccccagcaggtggtggccatcgccagcaatggcggtggcaagcaggcgctggagacggtccagcggctgttgccggtgctgtgccaggcccacggcttgaccccggagcaggtggtggccatcgccagcaatattggtggcaagcaggcgctggagacggtgcaggcgctgttgccggtgctgtgccaggcccacggcttgaccccggagcaggtggtggccatcgccagcaatattggtggcaagcaggcgctggagacggtgcaggcgctgttgccggtgctgtgccaggcccacggcttgaccccggagcaggtggtggccatcgccagcaatattggtggcaagcaggcgctggagacggtgcaggcgctgttgccggtgctgtgccaggcccacggcttgaccccggagcaggtggtggccatcgccagccacgatggcggcaagcaggcgctggagacggtccagcggctgttgccggtgctgtgccaggcccacggcttgaccccggagcaggtggtggccatcgccagccacgatggcggcaagcaggcgctggagacggtccagcggctgttgccggtgctgtgccaggcccacggcttgaccccccagcaggtggtggccatcgccagcaatggcggtggcaagcaggcgctggagacggtccagcggctgttgccggtgctgtgccaggcccacggcttgaccccggagcaggtggtggccatcgccagcaatattggtggcaagcaggcgctggagacggtgcaggcgctgttgccggtgctgtgccaggcccacggcttgaccccggagcaggtggtggccatcgccagcaatattggtggcaagcaggcgctggagacggtgcaggcgctgttgccggtgctgtgccaggcccacggcttgaccccggagcaggtggtggccatcgccagccacgatggcggcaagcaggcgctggagacggtccagcggctgttgccggtgctgtgccaggcccacggcttgaccccggagcaggtggtggccatcgccagccacgatggcggcaagcaggcgctggagacggtccagcggctgttgccggtgctgtgccaggcccacggcttgaccccggagcaggtggtggccatcgccagccacgatggcggcaagcaggcgctggagacggtccagcggctgttgccggtgctgtgccaggcccacggcttgaccccccagcaggtggtggccatcgccagcaatggcggtggcaagcaggcgctggagacggtccagcggctgttgccggtgctgtgccaggcccacggcttgaccccggagcaggtggtggccatcgccagccacgatggcggcaagcaggcgctggagacggtccagcggctgttgccggtgctgtgccaggcccacggcttgacccctcagcaggtggtggccatcgccagcaatggcggcggcaggccggcgctggagagcattgttgcccagttatctcgccctgatccgtcggccgactgataactcgagcgatcctctagacgagctcctcgagcctgcagcagctgaagctttggacttcttcgccagaggtttggtcaagtctccaatcaaggttgtcggcttgtctaccttgccagaaatttacgaaaagatggaaaagggtcaaatcgttggtagatacgttgttgacacttctaaataagcgaatttcttatgatttatgatttttattattaaataagttataaaaaaaataagtgtatacaaattttaaagtgactcttaggttttaaaacgaaaattcttattcttgagtaactctttcctgtaggtcaggttgctttctcaggtatagcatgaggtcgctcttattgaccacacctctaccggcatgcaagcttggcgtaatcatggtcatagctgtttcctgtgtgaaattgttatccgctcacaattccacacaacatacgagccggaagcataaagtgtaaagcctggggtgcctaatgagtgagctaactcacattaattgcgttgcgctcactgcccgctttccagtcgggaaacctgtcgtgccagcagatctattacattatgggtggtatgttggaataaaaatcaactatcatctactaactagtatttacgttactagtatattatcatatacggtgttagaagatgacgcaaatgatgagaaatagtcatctaaattagtggaagctgaaacgcaaggattgataatgtaataggatcaatgaatattaacatataaaatgatgataataatatttatagaattgtgtagaattgcagattcccttttatggattcctaaatcctcgaggagaacttctagtatatctacatacctaatattattgccttattaaaaatggaatcccaacaattacatcaaaatccacattctcttcaaaatcaattgtcctgtacttccttgttcatgtgtgttcaaaaacgttatatttataggataattatactctatttctcaacaagtaattggttgtttggccgagcggtctaaggcgcctgattcaagaaatatcttgaccgcagttaactgtgggaatactcaggtatcgtaagatgcaagagttcgaatctcttagcaaccattatttttttcctcaacataacgagaacacacaggggcgctatcgcacagaatcaaattcgatgactggaaattttttgttaatttcagaggtcgcctgacgcatatacctttttcaactgaaaaattgggagaaaaaggaaaggtgagagccgcggaaccggcttttcatatagaatagagaagcgttcatgactaaatgcttgcatcacaatacttgaagttgacaatattatttaaggacctattgttttttccaataggtggttagcaatcgtcttactttctaacttttcttaccttttacatttcagcaatatatatatatatatttcaaggatataccattctaatgtctgcccctaagaagatcgtcgttttgccaggtgaccacgttggtcaagaaatcacagccgaagccattaaggttcttaaagctatttctgatgttcgttccaatgtcaagttcgatttcgaaaatcatttaattggtggtgctgctatcgatgctacaggtgtcccacttccagatgaggcgctggaagcctccaagaaggttgatgccgttttgttaggtgctgtgggtggtcctaaatggggtaccggtagtgttagacctgaacaaggtttactaaaaatccgtaaagaacttcaattgtacgccaacttaagaccatgtaactttgcatccgactctcttttagacttatctccaatcaagccacaatttgctaaaggtactgacttcgttgttgtcagagaattagtgggaggtatttactttggtaagagaaaggaagacgatggtgatggtgtcgcttgggatagtgaacaatacaccgttccagaagtgcaaagaatcacaagaatggccgctttcatggccctacaacatgagccaccattgcctatttggtccttggataaagctaatgttttggcctcttcaagattatggagaaaaactgtggaggaaaccatcaagaacgaattccctacattgaaggttcaacatcaattgattgattctgccgccatgatcctagttaagaacccaacccacctaaatggtattataatcaccagcaacatgtttggtgatatcatctccgatgaagcctccgttatcccaggttccttgggtttgttgccatctgcgtccttggcctctttgccagacaagaacaccgcatttggtttgtacgaaccatgccacggttctgctccagatttgccaaagaataaggtcaaccctatcgccactatcttgtctgctgcaatgatgttgaaattgtcattgaacttgcctgaagaaggtaaggccattgaagatgcagttaaaaaggttttggatgcaggtatcagaactggtgatttaggtggttccaacagtaccacggaagtcggtgatgctgtcgccgaagaagttaagaaaatccttgcttaaaaagattctctttttttatgatatttgtacataaactttataaatgaaattcataatagaaacgacacgaaattacaaaatggaatatgttcatagggtagacgaaactatatacgcaatctacatacatttatcaagaaggagaaaaaggaggatgtaaaggaatacaggtaagcaaattgatactaatggctcaacgtgataaggaaaaagaattgcactttaacattaatattgacaaggaggagggcaccacacaaaaagttaggtgtaacagaaaatcatgaaactatgattcctaatttatatattggaggattttctctaaaaaaaaaaaaatacaacaaataaaaaacactcaatgacctgaccatttgatggagtttaagtcaataccttcttgaaccatttcccataatggtgaaagttccctcaagaattttactctgtcagaaacggccttaacgacgtagtcgacctcctcttcagtactaaatctaccaataccaaatctgatggaagaatgggctaatgcatcatccttacccagcgcatgtaaaacataagaaggttctagggaagcagatgtacaggctgaacccgaggataatgcgatatcccttagtgccatcaataaagattctccttccacgtaggcgaaagaaacgttaacacaccctggataacgatgatctggagatccgttcaacgtggtatgttcagcggataatagacctttgactaatttatcggatagtcttttgatgtgagcttggtcgttgtcaaattctttcttcatcaatctcgcagcttcaccaaatcccgctaccaatgggggggccaaagtaccagatctgctgcattaatgaatcggccaacgcgcggggagaggcggtttgcgtattgggcgctcttccgcttcctcgctcactgactcgctgcgctcggtcgttcggctgcggcgagcggtatcagcatcgatgaattccacggactatagactatactagtatactccgtctactgtacgatacacttccgctcaggtccttgtcctttaacgaggccttaccactcttttgttactctattgatccagctcagcaaaggcagtgtgatctaagattctatcttcgcgatgtagtaaaactagctagaccgagaaagagactagaaatgcaaaaggcacttctacaatggctgccatcattattatccgatgtgacgctgcagcttctcaatgatattcgaatacgctttgaggagatacagcctaatatccgacaaactgttttacagatttacgatcgtacttgttacccatcattgaattttgaacatccgaacctgggagttttccctgaaacagatagtatatttgaacctgtataataatatatagtctagcgctttacggaagacaatgtatgtatttcggttcctggagaaactattgcatctattgcataggtaatcttgcacgtcgcatccccggttcattttctgcgtttccatcttgcacttcaatagcatatctttgttaacgaagcatctgtgcttcattttgtagaacaaaaatgcaacgcgagagcgctaatttttcaaacaaagaatctgagctgcatttttacagaacagaaatgcaacgcgaaagcgctattttaccaacgaagaatctgtgcttcatttttgtaaaacaaaaatgcaacgcgagagcgctaatttttcaaacaaagaatctgagctgcatttttacagaacagaaatgcaacgcgagagcgctattttaccaacaaagaatctatacttcttttttgttctacaaaaatgcatcccgagagcgctatttttctaacaaagcatcttagattactttttttctcctttgtgcgctctataatgcagtctcttgataactttttgcactgtaggtccgttaaggttagaagaaggctactttggtgtctattttctcttccataaaaaaagcctgactccacttcccgcgtttactgattactagcgaagctgcgggtgcattttttcaagataaaggcatccccgattatattctataccgatgtggattgcgcatactttgtgaacagaaagtgatagcgttgatgattcttcattggtcagaaaattatgaacggtttcttctattttgtctctatatactacgtataggaaatgtttacattttcgtattgttttcgattcactctatgaatagttcttactacaatttttttgtctaaagagtaatactagagataaacataaaaaatgtagaggtcgagtttagatgcaagttcaaggagcgaaaggtggatgggtaggttatatagggatatagcacagagatatatagcaaagagatacttttgagcaatgtttgtggaagcggtattcgcaatattttagtagctcgttacagtccggtgcgtttttggttttttgaaagtgcgtcttcagagcgcttttggttttcaaaagcgctctgaagttcctatactttctagagaataggaacttcggaataggaacttcaaagcgtttccgaaaacgagcgcttccgaaaatgcaacgcgagctgcgcacatacagctcactgttcacgtcgcacctatatctgcgtgttgcctgtatatatatatacatgagaagaacggcatagtgcgtgtttatgcttaaatgcgtacttatatgcgtctatttatgtaggatgaaaggtagtctagtacctcctgtgatattatcccattccatgcggggtatcgtatgcttccttcagcactaccctttagctgttctatatgctgccactcctcaattggattagtctcatccttcaatgctatcatttcctttgatattggatcatatgcatagtaccgagaaactagtgcgaagtagtgatcaggtattgctgttatctgatgagtatacgttgtcctggccacggcagaagcacgcttatcgctccaatttcccacaacattagtcaactccgttaggcccttcattgaaagaaatgaggtcatcaaatgtcttccaatgtgagattttgggccattttttatagcaaagattgaataaggcgcatttttcttcaaagctttattgtacgatctgactaagttatcttttaataattggtattcctgtttattgcttgaagaattgccggtcctatttactcgttttaggactggttcagaattcatcgatgctcactcaaaggtcggtaatacggttatccacagaatcaggggataacgcaggaaagaac

SEQ ID NO: 275 - DNA, 10728 bp, Artificial sequence
  pCLS12100
atgtgagcaaaaggccagcaaaaggccaggaaccgtaaaaaggccgcgttgctggcgtttttccataggctccgcccccctgacgagcatcacaaaaatcgacgctcaagtcagaggtggcgaaacccgacaggactataaagataccaggcgtttccccctggaagctccctcgtgcgctctcctgttccgaccctgccgcttaccggatacctgtccgcctttctcccttcgggaagcgtggcgctttctcatagctcacgctgtaggtatctcagttcggtgtaggtcgttcgctccaagctgggctgtgtgcacgaaccccccgttcagcccgaccgctgcgccttatccggtaactatcgtcttgagtccaacccggtaagacacgacttatcgccactggcagcagccactggtaacaggattagcagagcgaggtatgtaggcggtgctacagagttcttgaagtggtggcctaactacggctacactagaaggacagtatttggtatctgcgctctgctgaagccagttaccttcggaaaaagagttggtagctcttgatccggcaaacaaaccaccgctggtagcggtggtttttttgtttgcaagcagcagattacgcgcagaaaaaaaggatctcaagaagatcctttgatcttttctacggggtctgacgctcagtggaacgaaaactcacgttaagggattttggtcatgagattatcaaaaaggatcttcacctagatccttttaaattaaaaatgaagttttaaatcaatctaaagtatatatgagtaaacttggtctgacagttaccaatgcttaatcagtgaggcacctatctcagcgatctgtctatttcgttcatccatagttgcctgactccccgtcgtgtagataactacgatacgggagggcttaccatctggccccagtgctgcaatgataccgcgagacccacgctcaccggctccagatttatcagcaataaaccagccagccggaagggccgagcgcagaagtggtcctgcaactttatccgcctccatccagtctattaattgttgccgggaagctagagtaagtagttcgccagttaatagtttgcgcaacgttgttgccattgctacaggcatcgtggtgtcacgctcgtcgtttggtatggcttcattcagctccggttcccaacgatcaaggcgagttacatgatcccccatgttgtgcaaaaaagcggttagctccttcggtcctccgatcgttgtcagaagtaagttggccgcagtgttatcactcatggttatggcagcactgcataattctcttactgtcatgccatccgtaagatgcttttctgtgactggtgagtactcaaccaagtcattctgagaatagtgtatgcggcgaccgagttgctcttgcccggcgtcaatacgggataataccgcgccacatagcagaactttaaaagtgctcatcattggaaaacgttcttcggggcgaaaactctcaaggatcttaccgctgttgagatccagttcgatgtaacccactcgtgcacccaactgatcttcagcatcttttactttcaccagcgtttctgggtgagcaaaaacaggaaggcaaaatgccgcaaaaaagggaataagggcgacacggaaatgttgaatactcatactcttcctttttcaatattattgaagcatttatcagggttattgtctcatgagcggatacatatttgaatgtatttagaaaaataaacaaataggggttccgcgcacatttccccgaaaagtgccacctgacgtccgatcaaaaatcatcgcttcgctgattaattaccccagaaataaggctaaaaaactaatcgcattatcatcctatggttgttaatttgattcgttcatttgaaggtttgtggggccaggttactgccaatttttcctcttcataaccataaaagctagtattgtagaatctttattgttcggagcagtgcggcgcgaggcacatctgcgtttcaggaacgcgaccggtgaagacgaggacgcacggaggagagtcttccttcggagggctgtcacccgctcggcggcttctaatccgtacttcaatatagcaatgagcagttaagcgtattactgaaagttccaaagagaaggtttttttaggctaatcgacctcgagcagatccgccaggcgtgtatatagcgtggatggccaggcaactttagtgctgacacatacaggcatatatatatgtgtgcgacgacacatgatcatatggcatgcatgtgctctgtatgtatataaaactcttgttttcttcttttctctaaatattctttccttatacattaggtcctttgtagcataaattactatacttctatagacacgcaaacacaaatacacagcggccttgccaccatggccaagtctggcatctaccagattaagaacaccctgaataacaaagtgtatgttggatctgccaaggactttgagaaaagatggaagaggcacttcaaggatctggaaaagggttgccacagctccatcaagctccaaaggtctttcaacaaacatggcaatgtctttgagtgctccattttggaagagatcccttatgaaaaggacctcattatagagagggaaaacttctggatcaaggagctgaactcaaaaatcaatggatacaacattgcagatgccacatttggtgacacctgttctactcacccccttaaggaagagatcattaaaaagaggtctgagactgtgaaggctaagatgttgaaacaaggtccatccggagtggatctacgcacgctcggctacagccagcagcaacaggagaagatcaaaccgaaggttcgttcgacagtggcgcagcaccacgaggcactggtcggccacgggtttacacacgcgcacatcgttgcgttaagccaacacccggcagcgttagggaccgtcgctgtcaagtatcaggacatgatcgcagcgttgccagaggcgacacacgaagcgatcgttggcgtcggcaaacagtggtccggcgcacgcgctctggaggccttgctcacggtggcgggagagttgagaggtccaccgttacagttggacacaggccaacttctcaagattgcaaaacgtggcggcgtgaccgcagtggaggcagtgcatgcatggcgcaatgcactgacgggtgccccgctcaacttgaccccccagcaggtggtggccatcgccagcaataatggtggcaagcaggcgctggagacggtccagcggctgttgccggtgctgtgccaggcccacggcttgaccccccagcaggtggtggccatcgccagcaatggcggtggcaagcaggcgctggagacggtccagcggctgttgccggtgctgtgccaggcccacggcttgaccccccagcaggtggtggccatcgccagcaatggcggtggcaagcaggcgctggagacggtccagcggctgttgccggtgctgtgccaggcccacggcttgaccccccagcaggtggtggccatcgccagcaatggcggtggcaagcaggcgctggagacggtccagcggctgttgccggtgctgtgccaggcccacggcttgaccccggagcaggtggtggccatcgccagcaatattggtggcaagcaggcgctggagacggtgcaggcgctgttgccggtgctgtgccaggcccacggcttgaccccccagcaggtggtggccatcgccagcaatggcggtggcaagcaggcgctggagacggtccagcggctgttgccggtgctgtgccaggcccacggcttgaccccccagcaggtggtggccatcgccagcaataatggtggcaagcaggcgctggagacggtccagcggctgttgccggtgctgtgccaggcccacggcttgaccccccagcaggtggtggccatcgccagcaataatggtggcaagcaggcgctggagacggtccagcggctgttgccggtgctgtgccaggcccacggcttgaccccccagcaggtggtggccatcgccagcaatggcggtggcaagcaggcgctggagacggtccagcggctgttgccggtgctgtgccaggcccacggcttgaccccccagcaggtggtggccatcgccagcaatggcggtggcaagcaggcgctggagacggtccagcggctgttgccggtgctgtgccaggcccacggcttgaccccggagcaggtggtggccatcgccagcaatattggtggcaagcaggcgctggagacggtgcaggcgctgttgccggtgctgtgccaggcccacggcttgaccccggagcaggtggtggccatcgccagccacgatggcggcaagcaggcgctggagacggtccagcggctgttgccggtgctgtgccaggcccacggcttgaccccccagcaggtggtggccatcgccagcaatggcggtggcaagcaggcgctggagacggtccagcggctgttgccggtgctgtgccaggcccacggcttgaccccccagcaggtggtggccatcgccagcaatggcggtggcaagcaggcgctggagacggtccagcggctgttgccggtgctgtgccaggcccacggcttgaccccggagcaggtggtggccatcgccagcaatattggtggcaagcaggcgctggagacggtgcaggcgctgttgccggtgctgtgccaggcccacggcttgacccctcagcaggtggtggccatcgccagcaatggcggcggcaggccggcgctggagagcattgttgcccagttatctcgccctgatccgtcggccgactgataactcgagcgatcctctagacgagctcctcgagcctgcagcagctgaagctttggacttcttcgccagaggtttggtcaagtctccaatcaaggttgtcggcttgtctaccttgccagaaatttacgaaaagatggaaaagggtcaaatcgttggtagatacgttgttgacacttctaaataagcgaatttcttatgatttatgatttttattattaaataagttataaaaaaaataagtgtatacaaattttaaagtgactcttaggttttaaaacgaaaattcttattcttgagtaactctttcctgtaggtcaggttgctttctcaggtatagcatgaggtcgctcttattgaccacacctctaccggcatgcaagcttggcgtaatcatggtcatagctgtttcctgtgtgaaattgttatccgctcacaattccacacaacatacgagccggaagcataaagtgtaaagcctggggtgcctaatgagtgagctaactcacattaattgcgttgcgctcactgcccgctttccagtcgggaaacctgtcgtgccagcagatctattacattatgggtggtatgttggaataaaaatcaactatcatctactaactagtatttacgttactagtatattatcatatacggtgttagaagatgacgcaaatgatgagaaatagtcatctaaattagtggaagctgaaacgcaaggattgataatgtaataggatcaatgaatattaacatataaaatgatgataataatatttatagaattgtgtagaattgcagattcccttttatggattcctaaatcctcgaggagaacttctagtatatctacatacctaatattattgccttattaaaaatggaatcccaacaattacatcaaaatccacattctcttcaaaatcaattgtcctgtacttccttgttcatgtgtgttcaaaaacgttatatttataggataattatactctatttctcaacaagtaattggttgtttggccgagcggtctaaggcgcctgattcaagaaatatcttgaccgcagttaactgtgggaatactcaggtatcgtaagatgcaagagttcgaatctcttagcaaccattatttttttcctcaacataacgagaacacacaggggcgctatcgcacagaatcaaattcgatgactggaaattttttgttaatttcagaggtcgcctgacgcatatacctttttcaactgaaaaattgggagaaaaaggaaaggtgagagccgcggaaccggcttttcatatagaatagagaagcgttcatgactaaatgcttgcatcacaatacttgaagttgacaatattatttaaggacctattgttttttccaataggtggttagcaatcgtcttactttctaacttttcttaccttttacatttcagcaatatatatatatatatttcaaggatataccattctaatgtctgcccctaagaagatcgtcgttttgccaggtgaccacgttggtcaagaaatcacagccgaagccattaaggttcttaaagctatttctgatgttcgttccaatgtcaagttcgatttcgaaaatcatttaattggtggtgctgctatcgatgctacaggtgtcccacttccagatgaggcgctggaagcctccaagaaggttgatgccgttttgttaggtgctgtgggtggtcctaaatggggtaccggtagtgttagacctgaacaaggtttactaaaaatccgtaaagaacttcaattgtacgccaacttaagaccatgtaactttgcatccgactctcttttagacttatctccaatcaagccacaatttgctaaaggtactgacttcgttgttgtcagagaattagtgggaggtatttactttggtaagagaaaggaagacgatggtgatggtgtcgcttgggatagtgaacaatacaccgttccagaagtgcaaagaatcacaagaatggccgctttcatggccctacaacatgagccaccattgcctatttggtccttggataaagctaatgttttggcctcttcaagattatggagaaaaactgtggaggaaaccatcaagaacgaattccctacattgaaggttcaacatcaattgattgattctgccgccatgatcctagttaagaacccaacccacctaaatggtattataatcaccagcaacatgtttggtgatatcatctccgatgaagcctccgttatcccaggttccttgggtttgttgccatctgcgtccttggcctctttgccagacaagaacaccgcatttggtttgtacgaaccatgccacggttctgctccagatttgccaaagaataaggtcaaccctatcgccactatcttgtctgctgcaatgatgttgaaattgtcattgaacttgcctgaagaaggtaaggccattgaagatgcagttaaaaaggttttggatgcaggtatcagaactggtgatttaggtggttccaacagtaccacggaagtcggtgatgctgtcgccgaagaagttaagaaaatccttgcttaaaaagattctctttttttatgatatttgtacataaactttataaatgaaattcataatagaaacgacacgaaattacaaaatggaatatgttcatagggtagacgaaactatatacgcaatctacatacatttatcaagaaggagaaaaaggaggatgtaaaggaatacaggtaagcaaattgatactaatggctcaacgtgataaggaaaaagaattgcactttaacattaatattgacaaggaggagggcaccacacaaaaagttaggtgtaacagaaaatcatgaaactatgattcctaatttatatattggaggattttctctaaaaaaaaaaaaatacaacaaataaaaaacactcaatgacctgaccatttgatggagtttaagtcaataccttcttgaaccatttcccataatggtgaaagttccctcaagaattttactctgtcagaaacggccttaacgacgtagtcgacctcctcttcagtactaaatctaccaataccaaatctgatggaagaatgggctaatgcatcatccttacccagcgcatgtaaaacataagaaggttctagggaagcagatgtacaggctgaacccgaggataatgcgatatcccttagtgccatcaataaagattctccttccacgtaggcgaaagaaacgttaacacaccctggataacgatgatctggagatccgttcaacgtggtatgttcagcggataatagacctttgactaatttatcggatagtcttttgatgtgagcttggtcgttgtcaaattctttcttcatcaatctcgcagcttcaccaaatcccgctaccaatgggggggccaaagtaccagatctgctgcattaatgaatcggccaacgcgcggggagaggcggtttgcgtattgggcgctcttccgcttcctcgctcactgactcgctgcgctcggtcgttcggctgcggcgagcggtatcagcatcgatgaattccacggactatagactatactagtatactccgtctactgtacgatacacttccgctcaggtccttgtcctttaacgaggccttaccactcttttgttactctattgatccagctcagcaaaggcagtgtgatctaagattctatcttcgcgatgtagtaaaactagctagaccgagaaagagactagaaatgcaaaaggcacttctacaatggctgccatcattattatccgatgtgacgctgcagcttctcaatgatattcgaatacgctttgaggagatacagcctaatatccgacaaactgttttacagatttacgatcgtacttgttacccatcattgaattttgaacatccgaacctgggagttttccctgaaacagatagtatatttgaacctgtataataatatatagtctagcgctttacggaagacaatgtatgtatttcggttcctggagaaactattgcatctattgcataggtaatcttgcacgtcgcatccccggttcattttctgcgtttccatcttgcacttcaatagcatatctttgttaacgaagcatctgtgcttcattttgtagaacaaaaatgcaacgcgagagcgctaatttttcaaacaaagaatctgagctgcatttttacagaacagaaatgcaacgcgaaagcgctattttaccaacgaagaatctgtgcttcatttttgtaaaacaaaaatgcaacgcgagagcgctaatttttcaaacaaagaatctgagctgcatttttacagaacagaaatgcaacgcgagagcgctattttaccaacaaagaatctatacttcttttttgttctacaaaaatgcatcccgagagcgctatttttctaacaaagcatcttagattactttttttctcctttgtgcgctctataatgcagtctcttgataactttttgcactgtaggtccgttaaggttagaagaaggctactttggtgtctattttctcttccataaaaaaagcctgactccacttcccgcgtttactgattactagcgaagctgcgggtgcattttttcaagataaaggcatccccgattatattctataccgatgtggattgcgcatactttgtgaacagaaagtgatagcgttgatgattcttcattggtcagaaaattatgaacggtttcttctattttgtctctatatactacgtataggaaatgtttacattttcgtattgttttcgattcactctatgaatagttcttactacaatttttttgtctaaagagtaatactagagataaacataaaaaatgtagaggtcgagtttagatgcaagttcaaggagcgaaaggtggatgggtaggttatatagggatatagcacagagatatatagcaaagagatacttttgagcaatgtttgtggaagcggtattcgcaatattttagtagctcgttacagtccggtgcgtttttggttttttgaaagtgcgtcttcagagcgcttttggttttcaaaagcgctctgaagttcctatactttctagagaataggaacttcggaataggaacttcaaagcgtttccgaaaacgagcgcttccgaaaatgcaacgcgagctgcgcacatacagctcactgttcacgtcgcacctatatctgcgtgttgcctgtatatatatatacatgagaagaacggcatagtgcgtgtttatgcttaaatgcgtacttatatgcgtctatttatgtaggatgaaaggtagtctagtacctcctgtgatattatcccattccatgcggggtatcgtatgcttccttcagcactaccctttagctgttctatatgctgccactcctcaattggattagtctcatccttcaatgctatcatttcctttgatattggatcatatgcatagtaccgagaaactagtgcgaagtagtgatcaggtattgctgttatctgatgagtatacgttgtcctggccacggcagaagcacgcttatcgctccaatttcccacaacattagtcaactccgttaggcccttcattgaaagaaatgaggtcatcaaatgtcttccaatgtgagattttgggccattttttatagcaaagattgaataaggcgcatttttcttcaaagctttattgtacgatctgactaagttatcttttaataattggtattcctgtttattgcttgaagaattgccggtcctatttactcgttttaggactggttcagaattcatcgatgctcactcaaaggtcggtaatacggttatccacagaatcaggggataacgcaggaaagaac

SEQ ID NO: 276 - DNA, 1614 bp, Artificial sequence
  NptIIT5-L RVD DNA insert
gcagcctcaacttgaccccggagcaggtggtggccatcgccagccacgatggcggcaagcaggcgctggagacggtccagcggctgttgccggtgctgtgccaggcccacggcttgaccccggagcaggtggtggccatcgccagccacgatggcggcaagcaggcgctggagacggtccagcggctgttgccggtgctgtgccaggcccacggcttgaccccccagcaggtggtggccatcgccagcaatggcggtggcaagcaggcgctggagacggtccagcggctgttgccggtgctgtgccaggcccacggcttgaccccccagcaggtggtggccatcgccagcaatggcggtggcaagcaggcgctggagacggtccagcggctgttgccggtgctgtgccaggcccacggcttgaccccccagcaggtggtggccatcgccagcaataatggtggcaagcaggcgctggagacggtccagcggctgttgccggtgctgtgccaggcccacggcttgaccccggagcaggtggtggccatcgccagccacgatggcggcaagcaggcgctggagacggtccagcggctgttgccggtgctgtgccaggcccacggcttgaccccccagcaggtggtggccatcgccagcaataatggtggcaagcaggcgctggagacggtccagcggctgttgccggtgctgtgccaggcccacggcttgaccccggagcaggtggtggccatcgccagccacgatggcggcaagcaggcgctggagacggtccagcggctgttgccggtgctgtgccaggcccacggcttgaccccggagcaggtggtggccatcgccagcaatattggtggcaagcaggcgctggagacggtgcaggcgctgttgccggtgctgtgccaggcccacggcttgaccccccagcaggtggtggccatcgccagcaataatggtggcaagcaggcgctggagacggtccagcggctgttgccggtgctgtgccaggcccacggcttgaccccggagcaggtggtggccatcgccagccacgatggcggcaagcaggcgctggagacggtccagcggctgttgccggtgctgtgccaggcccacggcttgaccccccagcaggtggtggccatcgccagcaatggcggtggcaagcaggcgctggagacggtccagcggctgttgccggtgctgtgccaggcccacggcttgaccccccagcaggtggtggccatcgccagcaataatggtggcaagcaggcgctggagacggtccagcggctgttgccggtgctgtgccaggcccacggcttgaccccccagcaggtggtggccatcgccagcaatggcggtggcaagcaggcgctggagacggtccagcggctgttgccggtgctgtgccaggcccacggcttgaccccccagcaggtggtggccatcgccagcaataatggtggcaagcaggcgctggagacggtccagcggctgttgccggtgctgtgccaggcccacggcttgacccctcagcaggtggtggccatcgccagcaatggcggcggcaggccggcgctggagagcattgtgatgc

SEQ ID NO: 277 - DNA, 1614 bp, Artificial sequence
  NptIIT5-R RVD DNA insert
gcagcctcaacttgaccccggagcaggtggtggccatcgccagcaatattggtggcaagcaggcgctggagacggtgcaggcgctgttgccggtgctgtgccaggcccacggcttgaccccccagcaggtggtggccatcgccagcaataatggtggcaagcaggcgctggagacggtccagcggctgttgccggtgctgtgccaggcccacggcttgaccccggagcaggtggtggccatcgccagccacgatggcggcaagcaggcgctggagacggtccagcggctgttgccggtgctgtgccaggcccacggcttgaccccggagcaggtggtggccatcgccagcaatattggtggcaagcaggcgctggagacggtgcaggcgctgttgccggtgctgtgccaggcccacggcttgaccccccagcaggtggtggccatcgccagcaataatggtggcaagcaggcgctggagacggtccagcggctgttgccggtgctgtgccaggcccacggcttgaccccggagcaggtggtggccatcgccagccacgatggcggcaagcaggcgctggagacggtccagcggctgttgccggtgctgtgccaggcccacggcttgaccccggagcaggtggtggccatcgccagccacgatggcggcaagcaggcgctggagacggtccagcggctgttgccggtgctgtgccaggcccacggcttgaccccggagcaggtggtggccatcgccagcaatattggtggcaagcaggcgctggagacggtgcaggcgctgttgccggtgctgtgccaggcccacggcttgaccccccagcaggtggtggccatcgccagcaataatggtggcaagcaggcgctggagacggtccagcggctgttgccggtgctgtgccaggcccacggcttgaccccccagcaggtggtggccatcgccagcaatggcggtggcaagcaggcgctggagacggtccagcggctgttgccggtgctgtgccaggcccacggcttgaccccggagcaggtggtggccatcgccagccacgatggcggcaagcaggcgctggagacggtccagcggctgttgccggtgctgtgccaggcccacggcttgaccccggagcaggtggtggccatcgccagccacgatggcggcaagcaggcgctggagacggtccagcggctgttgccggtgctgtgccaggcccacggcttgaccccggagcaggtggtggccatcgccagccacgatggcggcaagcaggcgctggagacggtccagcggctgttgccggtgctgtgccaggcccacggcttgaccccccagcaggtggtggccatcgccagcaatggcggtggcaagcaggcgctggagacggtccagcggctgttgccggtgctgtgccaggcccacggcttgaccccccagcaggtggtggccatcgccagcaatggcggtggcaagcaggcgctggagacggtccagcggctgttgccggtgctgtgccaggcccacggcttgacccctcagcaggtggtggccatcgccagcaatggcggcggcaggccggcgctggagagcattgtgatgc

SEQ ID NO: 278 - DNA, 1614 bp, Artificial sequence
  NptIIT6-L RVD DNA insert
gcagcctcaacttgaccccccagcaggtggtggccatcgccagcaataatggtggcaagcaggcgctggagacggtccagcggctgttgccggtgctgtgccaggcccacggcttgaccccggagcaggtggtggccatcgccagcaatattggtggcaagcaggcgctggagacggtgcaggcgctgttgccggtgctgtgccaggcccacggcttgaccccggagcaggtggtggccatcgccagcaatattggtggcaagcaggcgctggagacggtgcaggcgctgttgccggtgctgtgccaggcccacggcttgaccccccagcaggtggtggccatcgccagcaataatggtggcaagcaggcgctggagacggtccagcggctgttgccggtgctgtgccaggcccacggcttgaccccggagcaggtggtggccatcgccagccacgatggcggcaagcaggcgctggagacggtccagcggctgttgccggtgctgtgccaggcccacggcttgaccccccagcaggtggtggccatcgccagcaataatggtggcaagcaggcgctggagacggtccagcggctgttgccggtgctgtgccaggcccacggcttgaccccccagcaggtggtggccatcgccagcaataatggtggcaagcaggcgctggagacggtccagcggctgttgccggtgctgtgccaggcccacggcttgaccccccagcaggtggtggccatcgccagcaataatggtggcaagcaggcgctggagacggtccagcggctgttgccggtgctgtgccaggcccacggcttgaccccggagcaggtggtggccatcgccagcaatattggtggcaagcaggcgctggagacggtgcaggcgctgttgccggtgctgtgccaggcccacggcttgaccccggagcaggtggtggccatcgccagcaatattggtggcaagcaggcgctggagacggtgcaggcgctgttgccggtgctgtgccaggcccacggcttgaccccccagcaggtggtggccatcgccagcaataatggtggcaagcaggcgctggagacggtccagcggctgttgccggtgctgtgccaggcccacggcttgaccccccagcaggtggtggccatcgccagcaataatggtggcaagcaggcgctggagacggtccagcggctgttgccggtgctgtgccaggcccacggcttgaccccccagcaggtggtggccatcgccagcaataatggtggcaagcaggcgctggagacggtccagcggctgttgccggtgctgtgccaggcccacggcttgaccccggagcaggtggtggccatcgccagcaatattggtggcaagcaggcgctggagacggtgcaggcgctgttgccggtgctgtgccaggcccacggcttgaccccggagcaggtggtggccatcgccagccacgatggcggcaagcaggcgctggagacggtccagcggctgttgccggtgctgtgccaggcccacggcttgacccctcagcaggtggtggccatcgccagcaatggcggcggcaggccggcgctggagagcattgtgatgc

SEQ ID NO: 279 - DNA, 1614 bp, Artificial sequence
  NptIIT6-R RVD DNA insert
gcagcctcaacttgaccccccagcaggtggtggccatcgccagcaataatggtggcaagcaggcgctggagacggtccagcggctgttgccggtgctgtgccaggcccacggcttgaccccggagcaggtggtggccatcgccagcaatattggtggcaagcaggcgctggagacggtgcaggcgctgttgccggtgctgtgccaggcccacggcttgaccccggagcaggtggtggccatcgccagccacgatggcggcaagcaggcgctggagacggtccagcggctgttgccggtgctgtgccaggcccacggcttgaccccggagcaggtggtggccatcgccagcaatattggtggcaagcaggcgctggagacggtgcaggcgctgttgccggtgctgtgccaggcccacggcttgaccccccagcaggtggtggccatcgccagcaataatggtggcaagcaggcgctggagacggtccagcggctgttgccggtgctgtgccaggcccacggcttgaccccccagcaggtggtggccatcgccagcaataatggtggcaagcaggcgctggagacggtccagcggctgttgccggtgctgtgccaggcccacggcttgaccccggagcaggtggtggccatcgccagcaatattggtggcaagcaggcgctggagacggtgcaggcgctgttgccggtgctgtgccaggcccacggcttgaccccccagcaggtggtggccatcgccagcaataatggtggcaagcaggcgctggagacggtccagcggctgttgccggtgctgtgccaggcccacggcttgaccccggagcaggtggtggccatcgccagcaatattggtggcaagcaggcgctggagacggtgcaggcgctgttgccggtgctgtgccaggcccacggcttgaccccccagcaggtggtggccatcgccagcaatggcggtggcaagcaggcgctggagacggtccagcggctgttgccggtgctgtgccaggcccacggcttgaccccggagcaggtggtggccatcgccagccacgatggcggcaagcaggcgctggagacggtccagcggctgttgccggtgctgtgccaggcccacggcttgaccccggagcaggtggtggccatcgccagccacgatggcggcaagcaggcgctggagacggtccagcggctgttgccggtgctgtgccaggcccacggcttgaccccccagcaggtggtggccatcgccagcaatggcggtggcaagcaggcgctggagacggtccagcggctgttgccggtgctgtgccaggcccacggcttgaccccccagcaggtggtggccatcgccagcaataatggtggcaagcaggcgctggagacggtccagcggctgttgccggtgctgtgccaggcccacggcttgaccccggagcaggtggtggccatcgccagccacgatggcggcaagcaggcgctggagacggtccagcggctgttgccggtgctgtgccaggcccacggcttgacccctcagcaggtggtggccatcgccagcaatggcggcggcaggccggcgctggagagcattgtgatgc

SEQ ID NO: 280 - DNA, 5597 bp, Artificial sequence
  pCLS15783
ggtctttcctgcgttatcccctgattctgtggataaccgtattaccgcctttgagtgagctgataccgctcgccgcagccgaacgaccgagcgcagcgagtcagtgagcgaggaagcggagagcgcccaatacgcaaaccgcctctccccgcgcgttggccgattcattaatgcagctggcacgacaggtttcccgactggaaagcgggcagtgagcgcaacgcaattaatgtgagttagctcactcattaggcaccccaggctttacactttatgcttccggctcgtatgttgtgtggaattgtgagcggataacaatttcacacaggaaacagctatgaccatgattacgccaagcgcgtcaattaaccctcactaaagggaacaaaagctgttaattaagcgcgccacacgcaaacacaaatacacagcggccttgccaccatggccaagtctggcatctaccagattaagaacaccctgaataacaaagtgtatgttggatctgccaaggactttgagaaaagatggaagaggcacttcaaggatctggaaaagggttgccacagctccatcaagctccaaaggtctttcaacaaacatggcaatgtctttgagtgctccattttggaagagatcccttatgaaaaggacctcattatagagagggaaaacttctggatcaaggagctgaactcaaaaatcaatggatacaacattgcagatgccacatttggtgacacctgttctactcacccccttaaggaagagatcattaaaaagaggtctgagactgtgaaggctaagatgttgaaactggggcctgatggcagaaaggcactctactctaagccaggtagcaaaaatggaaggtggaaccctgagacccacaagttctgcaaatgtggggtgagaatacagacatcagcctacacttgcagcaagtgtaggaacagatcaggagagaataactcctttttcaaccacaagcattctcaaggtccatccggagtggatctacgcacgctcggctacagccagcagcaacaggagaagatcaaaccgaaggttcgttcgacagtggcgcagcaccacgaggcactggtcggccacgggtttacacacgcgcacatcgttgcgttaagccaacacccggcagcgttagggaccgtcgctgtcaagtatcaggacatgatcgcagcgttgccagaggcgacacacgaagcgatcgttggcgtcggcaaacagtggtccggcgcacgcgctctggaggccttgctcacggtggcgggagagttgagaggtccaccgttacagttggacacaggccaacttctcaagattgcaaaacgtggcggcgtgaccgcagtggaggcagtgcatgcatggcgcaatgcactgacgggtgccccgctcaacttgaccccggagcaggtggtggccatcgccagccacgatggcggcaagcaggcgctggagacggtccagcggctgttgccggtgctgtgccaggcccacggcttgaccccggagcaggtggtggccatcgccagccacgatggcggcaagcaggcgctggagacggtccagcggctgttgccggtgctgtgccaggcccacggcttgaccccccagcaggtggtggccatcgccagcaatggcggtggcaagcaggcgctggagacggtccagcggctgttgccggtgctgtgccaggcccacggcttgaccccccagcaggtggtggccatcgccagcaatggcggtggcaagcaggcgctggagacggtccagcggctgttgccggtgctgtgccaggcccacggcttgaccccccagcaggtggtggccatcgccagcaataatggtggcaagcaggcgctggagacggtccagcggctgttgccggtgctgtgccaggcccacggcttgaccccggagcaggtggtggccatcgccagccacgatggcggcaagcaggcgctggagacggtccagcggctgttgccggtgctgtgccaggcccacggcttgaccccccagcaggtggtggccatcgccagcaataatggtggcaagcaggcgctggagacggtccagcggctgttgccggtgctgtgccaggcccacggcttgaccccggagcaggtggtggccatcgccagccacgatggcggcaagcaggcgctggagacggtccagcggctgttgccggtgctgtgccaggcccacggcttgaccccggagcaggtggtggccatcgccagcaatattggtggcaagcaggcgctggagacggtgcaggcgctgttgccggtgctgtgccaggcccacggcttgaccccccagcaggtggtggccatcgccagcaataatggtggcaagcaggcgctggagacggtccagcggctgttgccggtgctgtgccaggcccacggcttgaccccggagcaggtggtggccatcgccagccacgatggcggcaagcaggcgctggagacggtccagcggctgttgccggtgctgtgccaggcccacggcttgaccccccagcaggtggtggccatcgccagcaatggcggtggcaagcaggcgctggagacggtccagcggctgttgccggtgctgtgccaggcccacggcttgaccccccagcaggtggtggccatcgccagcaataatggtggcaagcaggcgctggagacggtccagcggctgttgccggtgctgtgccaggcccacggcttgaccccccagcaggtggtggccatcgccagcaatggcggtggcaagcaggcgctggagacggtccagcggctgttgccggtgctgtgccaggcccacggcttgaccccccagcaggtggtggccatcgccagcaataatggtggcaagcaggcgctggagacggtccagcggctgttgccggtgctgtgccaggcccacggcttgacccctcagcaggtggtggccatcgccagcaatggcggcggcaggccggcgctggagagcattgttgcccagttatctcgccctgatccgtcggccgactgataagtcgaccaccaccaccaccaccactgataagagctcctcgagcctgcagcagctgaagctttggacttctggcgcgcccaattcgccctatagtgagtcgtattacgtcgcgctcactggccgtcgttttacaacgtcgtgactgggaaaaccctggcgttacccaacttaatcgccttgcagcacatccccctttcgccagctggcgtaatagcgaagaggcccgcaccgaaacgcccttcccaacagttgcgcagcctgaatggcgaatgggagcgccctgtagcggcgcattaagcgcggcgggtgtggtggttacgcgcagcgtgaccgctacacttgccagcgccctagcgcccgctcctttcgctttcttcccttcctttctcgccacgttcgccggctttccccgtcaagctctaaatcgggggctccctttagggttccgatttagtgctttacggcacctcgaccccaaaaaacttgattagggtgatggttggcctgtagtgggccatagccctgatagacggtttttcgccctttgacgttggagtccacgttctttaatagtggactcttgttccaaactggaacaacactcaaccctatctcggtctattcttttgatttataagggattttgccgatttcggcctattggttaaaaaatgagctgatttaacaaaaatttaacgcgaattttaacaaaatattaacgcttacaatttaggtggcacttttcggggaaatgtgcgcggaacccctatttgtttatttttctaaatacattcaaatatgtatccgctcatgagacaataaccctgataaatgcttcaataatattgaaaaaggaagagtatgagtattcaacatttccgtgtcgcccttattcccttttttgcggcattttgccttcctgtttttgctcacccagaaacgctggtgaaagtaaaagatgctgaagatcagttgggtgcacgagtgggttacatcgaactggatctcaacagcggtaagatccttgagagttttcgccccgaagaacgttttccaatgatgagcacttttaaagttctgctatgtggcgcggtattatcccgtattgacgccgggcaagagcaactcggtcgccgcatacactattctcagaatgacttggttgagtactcaccagtcacagaaaagcatcttacggatggcatgacagtaagagaattatgcagtgctgccataaccatgagtgataacactgcggccaacttacttctgacaacgatcggaggaccgaaggagctaaccgcttttttgcacaacatgggggatcatgtaactcgccttgatcgttgggaaccggagctgaatgaagccataccaaacgacgagcgtgacaccacgatgcctgtagcaatggcaacaacgttgcgcaaactattaactggcgaactacttactctagcttcccggcaacaattaatagactggatggaggcggataaagttgcaggaccacttctgcgctcggcccttccggctggctggtttattgctgataaatctggagccggtgagcgtggttctcgcggtatcattgcagcactggggccagatggtaagccctcccgtatcgtagttatctacacgacggggagtcaggcaactatggatgaacgaaatagacagatcgctgagataggtgcctcactgattaagcattggtaactgtcagaccaagtttactcatatatactttagattgatttaaaacttcatttttaatttaaaaggatctaggtgaagatcctttttgataatctcatgaccaaaatcccttaacgtgagttttcgttccactgagcgtcagaccccgtagaaaagatcaaaggatcttcttgagatcctttttttctgcgcgtaatctgctgcttgcaaacaaaaaaaccaccgctaccagcggtggtttgtttgccggatcaagagctaccaactctttttccgaaggtaactggcttcagcagagcgcagataccaaatactgttcttctagtgtagccgtagttaggccaccacttcaagaactctgtagcaccgcctacatacctcgctctgctaatcctgttaccagtggctgctgccagtggcgataagtcgtgtcttaccgggttggactcaagacgatagttaccggataaggcgcagcggtcgggctgaacggggggttcgtgcacacagcccagcttggagcgaacgacctacaccgaactgagatacctacagcgtgagctatgagaaagcgccacgcttcccgaagggagaaaggcggacaggtatccggtaagcggcagggtcggaacaggagagcgcacgagggagcttccagggggaaacgcctggtatctttatagtcctgtcgggtttcgccacctctgacttgagcgtcgatttttgtgatgctcgtcaggggggcggagcctatggaaaaacgccagcaacgcggcctttttacggttcctggccttttgctggccttttgctcacat

SEQ ID NO: 281 - DNA, 5597 bp, Artificial sequence
  pCLS15784
ggtctttcctgcgttatcccctgattctgtggataaccgtattaccgcctttgagtgagctgataccgctcgccgcagccgaacgaccgagcgcagcgagtcagtgagcgaggaagcggagagcgcccaatacgcaaaccgcctctccccgcgcgttggccgattcattaatgcagctggcacgacaggtttcccgactggaaagcgggcagtgagcgcaacgcaattaatgtgagttagctcactcattaggcaccccaggctttacactttatgcttccggctcgtatgttgtgtggaattgtgagcggataacaatttcacacaggaaacagctatgaccatgattacgccaagcgcgtcaattaaccctcactaaagggaacaaaagctgttaattaagcgcgccacacgcaaacacaaatacacagcggccttgccaccatggccaagtctggcatctaccagattaagaacaccctgaataacaaagtgtatgttggatctgccaaggactttgagaaaagatggaagaggcacttcaaggatctggaaaagggttgccacagctccatcaagctccaaaggtctttcaacaaacatggcaatgtctttgagtgctccattttggaagagatcccttatgaaaaggacctcattatagagagggaaaacttctggatcaaggagctgaactcaaaaatcaatggatacaacattgcagatgccacatttggtgacacctgttctactcacccccttaaggaagagatcattaaaaagaggtctgagactgtgaaggctaagatgttgaaactggggcctgatggcagaaaggcactctactctaagccaggtagcaaaaatggaaggtggaaccctgagacccacaagttctgcaaatgtggggtgagaatacagacatcagcctacacttgcagcaagtgtaggaacagatcaggagagaataactcctttttcaaccacaagcattctcaaggtccatccggagtggatctacgcacgctcggctacagccagcagcaacaggagaagatcaaaccgaaggttcgttcgacagtggcgcagcaccacgaggcactggtcggccacgggtttacacacgcgcacatcgttgcgttaagccaacacccggcagcgttagggaccgtcgctgtcaagtatcaggacatgatcgcagcgttgccagaggcgacacacgaagcgatcgttggcgtcggcaaacagtggtccggcgcacgcgctctggaggccttgctcacggtggcgggagagttgagaggtccaccgttacagttggacacaggccaacttctcaagattgcaaaacgtggcggcgtgaccgcagtggaggcagtgcatgcatggcgcaatgcactgacgggtgccccgctcaacttgaccccccagcaggtggtggccatcgccagcaataatggtggcaagcaggcgctggagacggtccagcggctgttgccggtgctgtgccaggcccacggcttgaccccggagcaggtggtggccatcgccagcaatattggtggcaagcaggcgctggagacggtgcaggcgctgttgccggtgctgtgccaggcccacggcttgaccccggagcaggtggtggccatcgccagcaatattggtggcaagcaggcgctggagacggtgcaggcgctgttgccggtgctgtgccaggcccacggcttgaccccccagcaggtggtggccatcgccagcaataatggtggcaagcaggcgctggagacggtccagcggctgttgccggtgctgtgccaggcccacggcttgaccccggagcaggtggtggccatcgccagccacgatggcggcaagcaggcgctggagacggtccagcggctgttgccggtgctgtgccaggcccacggcttgaccccccagcaggtggtggccatcgccagcaataatggtggcaagcaggcgctggagacggtccagcggctgttgccggtgctgtgccaggcccacggcttgaccccccagcaggtggtggccatcgccagcaataatggtggcaagcaggcgctggagacggtccagcggctgttgccggtgctgtgccaggcccacggcttgaccccccagcaggtggtggccatcgccagcaataatggtggcaagcaggcgctggagacggtccagcggctgttgccggtgctgtgccaggcccacggcttgaccccggagcaggtggtggccatcgccagcaatattggtggcaagcaggcgctggagacggtgcaggcgctgttgccggtgctgtgccaggcccacggcttgaccccggagcaggtggtggccatcgccagcaatattggtggcaagcaggcgctggagacggtgcaggcgctgttgccggtgctgtgccaggcccacggcttgaccccccagcaggtggtggccatcgccagcaataatggtggcaagcaggcgctggagacggtccagcggctgttgccggtgctgtgccaggcccacggcttgaccccccagcaggtggtggccatcgccagcaataatggtggcaagcaggcgctggagacggtccagcggctgttgccggtgctgtgccaggcccacggcttgaccccccagcaggtggtggccatcgccagcaataatggtggcaagcaggcgctggagacggtccagcggctgttgccggtgctgtgccaggcccacggcttgaccccggagcaggtggtggccatcgccagcaatattggtggcaagcaggcgctggagacggtgcaggcgctgttgccggtgctgtgccaggcccacggcttgaccccggagcaggtggtggccatcgccagccacgatggcggcaagcaggcgctggagacggtccagcggctgttgccggtgctgtgccaggcccacggcttgacccctcagcaggtggtggccatcgccagcaatggcggcggcaggccggcgctggagagcattgttgcccagttatctcgccctgatccgtcggccgactgataagtcgaccaccaccaccaccaccactgataagagctcctcgagcctgcagcagctgaagctttggacttctggcgcgcccaattcgccctatagtgagtcgtattacgtcgcgctcactggccgtcgttttacaacgtcgtgactgggaaaaccctggcgttacccaacttaatcgccttgcagcacatccccctttcgccagctggcgtaatagcgaagaggcccgcaccgaaacgcccttcccaacagttgcgcagcctgaatggcgaatgggagcgccctgtagcggcgcattaagcgcggcgggtgtggtggttacgcgcagcgtgaccgctacacttgccagcgccctagcgcccgctcctttcgctttcttcccttcctttctcgccacgttcgccggctttccccgtcaagctctaaatcgggggctccctttagggttccgatttagtgctttacggcacctcgaccccaaaaaacttgattagggtgatggttggcctgtagtgggccatagccctgatagacggtttttcgccctttgacgttggagtccacgttctttaatagtggactcttgttccaaactggaacaacactcaaccctatctcggtctattcttttgatttataagggattttgccgatttcggcctattggttaaaaaatgagctgatttaacaaaaatttaacgcgaattttaacaaaatattaacgcttacaatttaggtggcacttttcggggaaatgtgcgcggaacccctatttgtttatttttctaaatacattcaaatatgtatccgctcatgagacaataaccctgataaatgcttcaataatattgaaaaaggaagagtatgagtattcaacatttccgtgtcgcccttattcccttttttgcggcattttgccttcctgtttttgctcacccagaaacgctggtgaaagtaaaagatgctgaagatcagttgggtgcacgagtgggttacatcgaactggatctcaacagcggtaagatccttgagagttttcgccccgaagaacgttttccaatgatgagcacttttaaagttctgctatgtggcgcggtattatcccgtattgacgccgggcaagagcaactcggtcgccgcatacactattctcagaatgacttggttgagtactcaccagtcacagaaaagcatcttacggatggcatgacagtaagagaattatgcagtgctgccataaccatgagtgataacactgcggccaacttacttctgacaacgatcggaggaccgaaggagctaaccgcttttttgcacaacatgggggatcatgtaactcgccttgatcgttgggaaccggagctgaatgaagccataccaaacgacgagcgtgacaccacgatgcctgtagcaatggcaacaacgttgcgcaaactattaactggcgaactacttactctagcttcccggcaacaattaatagactggatggaggcggataaagttgcaggaccacttctgcgctcggcccttccggctggctggtttattgctgataaatctggagccggtgagcgtggttctcgcggtatcattgcagcactggggccagatggtaagccctcccgtatcgtagttatctacacgacggggagtcaggcaactatggatgaacgaaatagacagatcgctgagataggtgcctcactgattaagcattggtaactgtcagaccaagtttactcatatatactttagattgatttaaaacttcatttttaatttaaaaggatctaggtgaagatcctttttgataatctcatgaccaaaatcccttaacgtgagttttcgttccactgagcgtcagaccccgtagaaaagatcaaaggatcttcttgagatcctttttttctgcgcgtaatctgctgcttgcaaacaaaaaaaccaccgctaccagcggtggtttgtttgccggatcaagagctaccaactctttttccgaaggtaactggcttcagcagagcgcagataccaaatactgttcttctagtgtagccgtagttaggccaccacttcaagaactctgtagcaccgcctacatacctcgctctgctaatcctgttaccagtggctgctgccagtggcgataagtcgtgtcttaccgggttggactcaagacgatagttaccggataaggcgcagcggtcgggctgaacggggggttcgtgcacacagcccagcttggagcgaacgacctacaccgaactgagatacctacagcgtgagctatgagaaagcgccacgcttcccgaagggagaaaggcggacaggtatccggtaagcggcagggtcggaacaggagagcgcacgagggagcttccagggggaaacgcctggtatctttatagtcctgtcgggtttcgccacctctgacttgagcgtcgatttttgtgatgctcgtcaggggggcggagcctatggaaaaacgccagcaacgcggcctttttacggttcctggccttttgctggccttttgctcacat

SEQ ID NO: 282 - DNA, 4440 bp, Artificial sequence
  pCLS14529
atgtgagcaaaaggccagcaaaaggccaggaaccgtaaaaaggccgcgttgctggcgtttttccataggctccgcccccctgacgagcatcacaaaaatcgacgctcaagtcagaggtggcgaaacccgacaggactataaagataccaggcgtttccccctggaagctccctcgtgcgctctcctgttccgaccctgccgcttaccggatacctgtccgcctttctcccttcgggaagcgtggcgctttctcatagctcacgctgtaggtatctcagttcggtgtaggtcgttcgctccaagctgggctgtgtgcacgaaccccccgttcagcccgaccgctgcgccttatccggtaactatcgtcttgagtccaacccggtaagacacgacttatcgccactggcagcagccactggtaacaggattagcagagcgaggtatgtaggcggtgctacagagttcttgaagtggtggcctaactacggctacactagaaggacagtatttggtatctgcgctctgctgaagccagttaccttcggaaaaagagttggtagctcttgatccggcaaacaaaccaccgctggtagcggtggtttttttgtttgcaagcagcagattacgcgcagaaaaaaaggatctcaagaagatcctttgatcttttctacggggtctgacgctcagtggaacgaaaactcacgttaagggattttggtcatgagattatcaaaaaggatcttcacctagatccttttaaattaaaaatgaagttttaaatcaatctaaagtatatatgagtaaacttggtctgacagttaccaatgcttaatcagtgaggcacctatctcagcgatctgtctatttcgttcatccatagttgcctgactccccgtcgtgtagataactacgatacgggagggcttaccatctggccccagtgctgcaatgataccgcgagacccacgctcaccggctccagatttatcagcaataaaccagccagccggaagggccgagcgcagaagtggtcctgcaactttatccgcctccatccagtctattaattgttgccgggaagctagagtaagtagttcgccagttaatagtttgcgcaacgttgttgccattgctacaggcatcgtggtgtcacgctcgtcgtttggtatggcttcattcagctccggttcccaacgatcaaggcgagttacatgatcccccatgttgtgcaaaaaagcggttagctccttcggtcctccgatcgttgtcagaagtaagttggccgcagtgttatcactcatggttatggcagcactgcataattctcttactgtcatgccatccgtaagatgcttttctgtgactggtgagtactcaaccaagtcattctgagaatagtgtatgcggcgaccgagttgctcttgcccggcgtcaatacgggataataccgcgccacatagcagaactttaaaagtgctcatcattggaaaacgttcttcggggcgaaaactctcaaggatcttaccgctgttgagatccagttcgatgtaacccactcgtgcacccaactgatcttcagcatcttttactttcaccagcgtttctgggtgagcaaaaacaggaaggcaaaatgccgcaaaaaagggaataagggcgacacggaaatgttgaatactcatactcttcctttttcaatattattgaagcatttatcagggttattgtctcatgagcggatacatatttgaatgtatttagaaaaataaacaaataggggttccgcgcacatttccccgaaaagtgccacctgacgtctaagaaaccattattatcatgacattaacctataaaaataggcgtatcacgaggccctttcgtctcgcgcgtttcggtgatgacggtgaaaacctctgacacatgcagctcccggagacggtcacagcttgtctgtaagcggatgccgggagcagacaagcccgtcagggcgcgtcagcgggtgttggcgggtgtcggggctggcttaactatgcggcatcagagcagattgtactgagagtgcaccatatgcggtgtgaaataccgcacagatgcgtaaggagaaaataccgcatcaggcgccattcgccattcaggctgcgcaactgttgggaagggcgatcggtgcgggcctcttcgctattacgccagctggcgaaagggggatgtgctgcaaggcgattaagttgggtaacgccagggttttcccagtcacgacgttgtaaaacgacggccagtgccaagcttgcatgcctgcagtgcagcgtgaccaaatctcagaattccaatcccacaaaaatctgagcttaacagcacagttgctcctctcagagcagaatcgggtattcaacaccctcatatcaactactacgttgtgtataacggtccacatgccggtatatacgatgactggggttgtacaaaggcggcaacaaacggcgttcccggagttgcacacaagaaatttgccactattacagaggcaagagcagcagctgacgcgtacacaacaagtcagcaaacagacaggttgaacttcatccccaaaggagaagctcaactcaagcccaagagctttgctaaggccctaacaagcccaccaaagcaaaaagcccactggctcacgctaggaaccaaaaggcccagcagtgatccagccccaaaagagatctcctttgccccggagattacaatggacgatttcctctatctttacgatctaggaaggaagttcgaaggtgaaggtgacgacactatgttcaccactgataatgagaaggttagcctcttcaatttcagaaagaatgctgacccacagatggttagagaggcctacgcagcaggtctcatcaagacgatctacccgagtaacaatctccaggagatcaaataccttcccaagaaggttaaagatgcagtcaaaagattcaggactaattgcatcaagaacacagagaaagacatatttctcaagatcagaagtactattccagtatggacgattcaaggcttgcttcataaaccaaggcaagtaatagagattggagtctctaaaaaggtagttcctactgaatctaaggccatgcatggagtctaagattcaaatcgaggatctaacagaactcgccgtgaagactggcgaacagttcatacagagtcttttacgactcaatgacaagaagaaaatcttcgtcaacatggtggagcacgacactctggtctactccaaaaatgtcaaagatacagtctcagaagaccaaagggctattgagacttttcaacaaaggataatttcgggaaacctcctcggattccattgcccagctatctgtcacttcatcgaaaggacagtagaaaaggaaggtggctcctacaaatgccatcattgcgataaaggaaaggctatcattcaagatctctctgccgacagtggtcccaaagatggacccccacccacgaggagcatcgtggaaaaagaagacgttccaaccacgtcttcaaagcaagtggattgatgtgacatctccactgacgtaagggatgacgcacaatcccactatccttcgcaagacccttcctctatataaggaagttcatttcatttggagaggacacgcacgagatctgcaggtcgactctagaggatcccctcgaggcgcgccacacgcaaacacaaatacacagcggccttgccaccatggcaaacaccggtggatcctccggaagatcttcggccgactgataagtcgaccaccaccaccaccaccactgataagagctcgaatttccccgatcgttcaaacatttggcaataaagtttcttaagattgaatcctgttgccggtcttgcgatgattatcatataatttctgttgaattacgttaagcatgtaataattaacatgtaatgcatgacgttatttatgagatgggtttttatgattagagtcccgcaattatacatttaatacgcgatagaaaacaaaatatagcgcgcaaactaggataaattatcgcgcgcggtgtcatctatgttactagatcgggaattcgtaatcatggtcatagctgtttcctgtgtgaaattgttatccgctcacaattccacacaacatacgagccggaagcataaagtgtaaagcctggggtgcctaatgagtgagctaactcacattaattgcgttgcgctcactgcccgctttccagtcgggaaacctgtcgtgccagctgcattaatgaatcggccaacgcgcggggagaggcggtttgcgtattgggcgctcttccgcttcctcgctcactgactcgctgcgctcggtcgttcggctgcggcgagcggtatcagctcactcaaaggcggtaatacggttatccacagaatcaggggataacgcaggaaagaac

SEQ ID NO: 283 - DNA, 7005 bp, Artificial sequence
  pCLS14579
atgtgagcaaaaggccagcaaaaggccaggaaccgtaaaaaggccgcgttgctggcgtttttccataggctccgcccccctgacgagcatcacaaaaatcgacgctcaagtcagaggtggcgaaacccgacaggactataaagataccaggcgtttccccctggaagctccctcgtgcgctctcctgttccgaccctgccgcttaccggatacctgtccgcctttctcccttcgggaagcgtggcgctttctcatagctcacgctgtaggtatctcagttcggtgtaggtcgttcgctccaagctgggctgtgtgcacgaaccccccgttcagcccgaccgctgcgccttatccggtaactatcgtcttgagtccaacccggtaagacacgacttatcgccactggcagcagccactggtaacaggattagcagagcgaggtatgtaggcggtgctacagagttcttgaagtggtggcctaactacggctacactagaaggacagtatttggtatctgcgctctgctgaagccagttaccttcggaaaaagagttggtagctcttgatccggcaaacaaaccaccgctggtagcggtggtttttttgtttgcaagcagcagattacgcgcagaaaaaaaggatctcaagaagatcctttgatcttttctacggggtctgacgctcagtggaacgaaaactcacgttaagggattttggtcatgagattatcaaaaaggatcttcacctagatccttttaaattaaaaatgaagttttaaatcaatctaaagtatatatgagtaaacttggtctgacagttaccaatgcttaatcagtgaggcacctatctcagcgatctgtctatttcgttcatccatagttgcctgactccccgtcgtgtagataactacgatacgggagggcttaccatctggccccagtgctgcaatgataccgcgagacccacgctcaccggctccagatttatcagcaataaaccagccagccggaagggccgagcgcagaagtggtcctgcaactttatccgcctccatccagtctattaattgttgccgggaagctagagtaagtagttcgccagttaatagtttgcgcaacgttgttgccattgctacaggcatcgtggtgtcacgctcgtcgtttggtatggcttcattcagctccggttcccaacgatcaaggcgagttacatgatcccccatgttgtgcaaaaaagcggttagctccttcggtcctccgatcgttgtcagaagtaagttggccgcagtgttatcactcatggttatggcagcactgcataattctcttactgtcatgccatccgtaagatgcttttctgtgactggtgagtactcaaccaagtcattctgagaatagtgtatgcggcgaccgagttgctcttgcccggcgtcaatacgggataataccgcgccacatagcagaactttaaaagtgctcatcattggaaaacgttcttcggggcgaaaactctcaaggatcttaccgctgttgagatccagttcgatgtaacccactcgtgcacccaactgatcttcagcatcttttactttcaccagcgtttctgggtgagcaaaaacaggaaggcaaaatgccgcaaaaaagggaataagggcgacacggaaatgttgaatactcatactcttcctttttcaatattattgaagcatttatcagggttattgtctcatgagcggatacatatttgaatgtatttagaaaaataaacaaataggggttccgcgcacatttccccgaaaagtgccacctgacgtctaagaaaccattattatcatgacattaacctataaaaataggcgtatcacgaggccctttcgtctcgcgcgtttcggtgatgacggtgaaaacctctgacacatgcagctcccggagacggtcacagcttgtctgtaagcggatgccgggagcagacaagcccgtcagggcgcgtcagcgggtgttggcgggtgtcggggctggcttaactatgcggcatcagagcagattgtactgagagtgcaccatatgcggtgtgaaataccgcacagatgcgtaaggagaaaataccgcatcaggcgccattcgccattcaggctgcgcaactgttgggaagggcgatcggtgcgggcctcttcgctattacgccagctggcgaaagggggatgtgctgcaaggcgattaagttgggtaacgccagggttttcccagtcacgacgttgtaaaacgacggccagtgccaagcttgcatgcctgcagtgcagcgtgaccaaatctcagaattccaatcccacaaaaatctgagcttaacagcacagttgctcctctcagagcagaatcgggtattcaacaccctcatatcaactactacgttgtgtataacggtccacatgccggtatatacgatgactggggttgtacaaaggcggcaacaaacggcgttcccggagttgcacacaagaaatttgccactattacagaggcaagagcagcagctgacgcgtacacaacaagtcagcaaacagacaggttgaacttcatccccaaaggagaagctcaactcaagcccaagagctttgctaaggccctaacaagcccaccaaagcaaaaagcccactggctcacgctaggaaccaaaaggcccagcagtgatccagccccaaaagagatctcctttgccccggagattacaatggacgatttcctctatctttacgatctaggaaggaagttcgaaggtgaaggtgacgacactatgttcaccactgataatgagaaggttagcctcttcaatttcagaaagaatgctgacccacagatggttagagaggcctacgcagcaggtctcatcaagacgatctacccgagtaacaatctccaggagatcaaataccttcccaagaaggttaaagatgcagtcaaaagattcaggactaattgcatcaagaacacagagaaagacatatttctcaagatcagaagtactattccagtatggacgattcaaggcttgcttcataaaccaaggcaagtaatagagattggagtctctaaaaaggtagttcctactgaatctaaggccatgcatggagtctaagattcaaatcgaggatctaacagaactcgccgtgaagactggcgaacagttcatacagagtcttttacgactcaatgacaagaagaaaatcttcgtcaacatggtggagcacgacactctggtctactccaaaaatgtcaaagatacagtctcagaagaccaaagggctattgagacttttcaacaaaggataatttcgggaaacctcctcggattccattgcccagctatctgtcacttcatcgaaaggacagtagaaaaggaaggtggctcctacaaatgccatcattgcgataaaggaaaggctatcattcaagatctctctgccgacagtggtcccaaagatggacccccacccacgaggagcatcgtggaaaaagaagacgttccaaccacgtcttcaaagcaagtggattgatgtgacatctccactgacgtaagggatgacgcacaatcccactatccttcgcaagacccttcctctatataaggaagttcatttcatttggagaggacacgcacgagatctgcaggtcgactctagaggatcccctcgaggcgcgccacacgcaaacacaaatacacagcggccttgccaccatggccaagtctggcatctaccagattaagaacaccctgaataacaaagtgtatgttggatctgccaaggactttgagaaaagatggaagaggcacttcaaggatctggaaaagggttgccacagctccatcaagctccaaaggtctttcaacaaacatggcaatgtctttgagtgctccattttggaagagatcccttatgaaaaggacctcattatagagagggaaaacttctggatcaaggagctgaactcaaaaatcaatggatacaacattgcagatgccacatttggtgacacctgttctactcacccccttaaggaagagatcattaaaaagaggtctgagactgtgaaggctaagatgttgaaactggggcctgatggcagaaaggcactctactctaagccaggtagcaaaaatggaaggtggaaccctgagacccacaagttctgcaaatgtggggtgagaatacagacatcagcctacacttgcagcaagtgtaggaacagatcaggagagaataactcctttttcaaccacaagcattctcaaggtccatccggagtggatctacgcacgctcggctacagccagcagcaacaggagaagatcaaaccgaaggttcgttcgacagtggcgcagcaccacgaggcactggtcggccacgggtttacacacgcgcacatcgttgcgttaagccaacacccggcagcgttagggaccgtcgctgtcaagtatcaggacatgatcgcagcgttgccagaggcgacacacgaagcgatcgttggcgtcggcaaacagtggtccggcgcacgcgctctggaggccttgctcacggtggcgggagagttgagaggtccaccgttacagttggacacaggccaacttctcaagattgcaaaacgtggcggcgtgaccgcagtggaggcagtgcatgcatggcgcaatgcactgacgggtgccccgctcaacttgaccccggagcaggtggtggccatcgccagccacgatggcggcaagcaggcgctggagacggtccagcggctgttgccggtgctgtgccaggcccacggcttgaccccggagcaggtggtggccatcgccagccacgatggcggcaagcaggcgctggagacggtccagcggctgttgccggtgctgtgccaggcccacggcttgaccccccagcaggtggtggccatcgccagcaatggcggtggcaagcaggcgctggagacggtccagcggctgttgccggtgctgtgccaggcccacggcttgaccccccagcaggtggtggccatcgccagcaatggcggtggcaagcaggcgctggagacggtccagcggctgttgccggtgctgtgccaggcccacggcttgaccccccagcaggtggtggccatcgccagcaataatggtggcaagcaggcgctggagacggtccagcggctgttgccggtgctgtgccaggcccacggcttgaccccggagcaggtggtggccatcgccagccacgatggcggcaagcaggcgctggagacggtccagcggctgttgccggtgctgtgccaggcccacggcttgaccccccagcaggtggtggccatcgccagcaataatggtggcaagcaggcgctggagacggtccagcggctgttgccggtgctgtgccaggcccacggcttgaccccggagcaggtggtggccatcgccagccacgatggcggcaagcaggcgctggagacggtccagcggctgttgccggtgctgtgccaggcccacggcttgaccccggagcaggtggtggccatcgccagcaatattggtggcaagcaggcgctggagacggtgcaggcgctgttgccggtgctgtgccaggcccacggcttgaccccccagcaggtggtggccatcgccagcaataatggtggcaagcaggcgctggagacggtccagcggctgttgccggtgctgtgccaggcccacggcttgaccccggagcaggtggtggccatcgccagccacgatggcggcaagcaggcgctggagacggtccagcggctgttgccggtgctgtgccaggcccacggcttgaccccccagcaggtggtggccatcgccagcaatggcggtggcaagcaggcgctggagacggtccagcggctgttgccggtgctgtgccaggcccacggcttgaccccccagcaggtggtggccatcgccagcaataatggtggcaagcaggcgctggagacggtccagcggctgttgccggtgctgtgccaggcccacggcttgaccccccagcaggtggtggccatcgccagcaatggcggtggcaagcaggcgctggagacggtccagcggctgttgccggtgctgtgccaggcccacggcttgaccccccagcaggtggtggccatcgccagcaataatggtggcaagcaggcgctggagacggtccagcggctgttgccggtgctgtgccaggcccacggcttgacccctcagcaggtggtggccatcgccagcaatggcggcggcaggccggcgctggagagcattgttgcccagttatctcgccctgatccgtcggccgactgataagtcgaccaccaccaccaccaccactgataagagctcgaatttccccgatcgttcaaacatttggcaataaagtttcttaagattgaatcctgttgccggtcttgcgatgattatcatataatttctgttgaattacgttaagcatgtaataattaacatgtaatgcatgacgttatttatgagatgggtttttatgattagagtcccgcaattatacatttaatacgcgatagaaaacaaaatatagcgcgcaaactaggataaattatcgcgcgcggtgtcatctatgttactagatcgggaattcgtaatcatggtcatagctgtttcctgtgtgaaattgttatccgctcacaattccacacaacatacgagccggaagcataaagtgtaaagcctggggtgcctaatgagtgagctaactcacattaattgcgttgcgctcactgcccgctttccagtcgggaaacctgtcgtgccagctgcattaatgaatcggccaacgcgcggggagaggcggtttgcgtattgggcgctcttccgcttcctcgctcactgactcgctgcgctcggtcgttcggctgcggcgagcggtatcagctcactcaaaggcggtaatacggttatccacagaatcaggggataacgcaggaaagaac

SEQ ID NO: 284 - DNA, 7005 bp, Artificial sequence
  pCLS14581
atgtgagcaaaaggccagcaaaaggccaggaaccgtaaaaaggccgcgttgctggcgtttttccataggctccgcccccctgacgagcatcacaaaaatcgacgctcaagtcagaggtggcgaaacccgacaggactataaagataccaggcgtttccccctggaagctccctcgtgcgctctcctgttccgaccctgccgcttaccggatacctgtccgcctttctcccttcgggaagcgtggcgctttctcatagctcacgctgtaggtatctcagttcggtgtaggtcgttcgctccaagctgggctgtgtgcacgaaccccccgttcagcccgaccgctgcgccttatccggtaactatcgtcttgagtccaacccggtaagacacgacttatcgccactggcagcagccactggtaacaggattagcagagcgaggtatgtaggcggtgctacagagttcttgaagtggtggcctaactacggctacactagaaggacagtatttggtatctgcgctctgctgaagccagttaccttcggaaaaagagttggtagctcttgatccggcaaacaaaccaccgctggtagcggtggtttttttgtttgcaagcagcagattacgcgcagaaaaaaaggatctcaagaagatcctttgatcttttctacggggtctgacgctcagtggaacgaaaactcacgttaagggattttggtcatgagattatcaaaaaggatcttcacctagatccttttaaattaaaaatgaagttttaaatcaatctaaagtatatatgagtaaacttggtctgacagttaccaatgcttaatcagtgaggcacctatctcagcgatctgtctatttcgttcatccatagttgcctgactccccgtcgtgtagataactacgatacgggagggcttaccatctggccccagtgctgcaatgataccgcgagacccacgctcaccggctccagatttatcagcaataaaccagccagccggaagggccgagcgcagaagtggtcctgcaactttatccgcctccatccagtctattaattgttgccgggaagctagagtaagtagttcgccagttaatagtttgcgcaacgttgttgccattgctacaggcatcgtggtgtcacgctcgtcgtttggtatggcttcattcagctccggttcccaacgatcaaggcgagttacatgatcccccatgttgtgcaaaaaagcggttagctccttcggtcctccgatcgttgtcagaagtaagttggccgcagtgttatcactcatggttatggcagcactgcataattctcttactgtcatgccatccgtaagatgcttttctgtgactggtgagtactcaaccaagtcattctgagaatagtgtatgcggcgaccgagttgctcttgcccggcgtcaatacgggataataccgcgccacatagcagaactttaaaagtgctcatcattggaaaacgttcttcggggcgaaaactctcaaggatcttaccgctgttgagatccagttcgatgtaacccactcgtgcacccaactgatcttcagcatcttttactttcaccagcgtttctgggtgagcaaaaacaggaaggcaaaatgccgcaaaaaagggaataagggcgacacggaaatgttgaatactcatactcttcctttttcaatattattgaagcatttatcagggttattgtctcatgagcggatacatatttgaatgtatttagaaaaataaacaaataggggttccgcgcacatttccccgaaaagtgccacctgacgtctaagaaaccattattatcatgacattaacctataaaaataggcgtatcacgaggccctttcgtctcgcgcgtttcggtgatgacggtgaaaacctctgacacatgcagctcccggagacggtcacagcttgtctgtaagcggatgccgggagcagacaagcccgtcagggcgcgtcagcgggtgttggcgggtgtcggggctggcttaactatgcggcatcagagcagattgtactgagagtgcaccatatgcggtgtgaaataccgcacagatgcgtaaggagaaaataccgcatcaggcgccattcgccattcaggctgcgcaactgttgggaagggcgatcggtgcgggcctcttcgctattacgccagctggcgaaagggggatgtgctgcaaggcgattaagttgggtaacgccagggttttcccagtcacgacgttgtaaaacgacggccagtgccaagcttgcatgcctgcagtgcagcgtgaccaaatctcagaattccaatcccacaaaaatctgagcttaacagcacagttgctcctctcagagcagaatcgggtattcaacaccctcatatcaactactacgttgtgtataacggtccacatgccggtatatacgatgactggggttgtacaaaggcggcaacaaacggcgttcccggagttgcacacaagaaatttgccactattacagaggcaagagcagcagctgacgcgtacacaacaagtcagcaaacagacaggttgaacttcatccccaaaggagaagctcaactcaagcccaagagctttgctaaggccctaacaagcccaccaaagcaaaaagcccactggctcacgctaggaaccaaaaggcccagcagtgatccagccccaaaagagatctcctttgccccggagattacaatggacgatttcctctatctttacgatctaggaaggaagttcgaaggtgaaggtgacgacactatgttcaccactgataatgagaaggttagcctcttcaatttcagaaagaatgctgacccacagatggttagagaggcctacgcagcaggtctcatcaagacgatctacccgagtaacaatctccaggagatcaaataccttcccaagaaggttaaagatgcagtcaaaagattcaggactaattgcatcaagaacacagagaaagacatatttctcaagatcagaagtactattccagtatggacgattcaaggcttgcttcataaaccaaggcaagtaatagagattggagtctctaaaaaggtagttcctactgaatctaaggccatgcatggagtctaagattcaaatcgaggatctaacagaactcgccgtgaagactggcgaacagttcatacagagtcttttacgactcaatgacaagaagaaaatcttcgtcaacatggtggagcacgacactctggtctactccaaaaatgtcaaagatacagtctcagaagaccaaagggctattgagacttttcaacaaaggataatttcgggaaacctcctcggattccattgcccagctatctgtcacttcatcgaaaggacagtagaaaaggaaggtggctcctacaaatgccatcattgcgataaaggaaaggctatcattcaagatctctctgccgacagtggtcccaaagatggacccccacccacgaggagcatcgtggaaaaagaagacgttccaaccacgtcttcaaagcaagtggattgatgtgacatctccactgacgtaagggatgacgcacaatcccactatccttcgcaagacccttcctctatataaggaagttcatttcatttggagaggacacgcacgagatctgcaggtcgactctagaggatcccctcgaggcgcgccacacgcaaacacaaatacacagcggccttgccaccatggccaagtctggcatctaccagattaagaacaccctgaataacaaagtgtatgttggatctgccaaggactttgagaaaagatggaagaggcacttcaaggatctggaaaagggttgccacagctccatcaagctccaaaggtctttcaacaaacatggcaatgtctttgagtgctccattttggaagagatcccttatgaaaaggacctcattatagagagggaaaacttctggatcaaggagctgaactcaaaaatcaatggatacaacattgcagatgccacatttggtgacacctgttctactcacccccttaaggaagagatcattaaaaagaggtctgagactgtgaaggctaagatgttgaaactggggcctgatggcagaaaggcactctactctaagccaggtagcaaaaatggaaggtggaaccctgagacccacaagttctgcaaatgtggggtgagaatacagacatcagcctacacttgcagcaagtgtaggaacagatcaggagagaataactcctttttcaaccacaagcattctcaaggtccatccggagtggatctacgcacgctcggctacagccagcagcaacaggagaagatcaaaccgaaggttcgttcgacagtggcgcagcaccacgaggcactggtcggccacgggtttacacacgcgcacatcgttgcgttaagccaacacccggcagcgttagggaccgtcgctgtcaagtatcaggacatgatcgcagcgttgccagaggcgacacacgaagcgatcgttggcgtcggcaaacagtggtccggcgcacgcgctctggaggccttgctcacggtggcgggagagttgagaggtccaccgttacagttggacacaggccaacttctcaagattgcaaaacgtggcggcgtgaccgcagtggaggcagtgcatgcatggcgcaatgcactgacgggtgccccgctcaacttgaccccccagcaggtggtggccatcgccagcaataatggtggcaagcaggcgctggagacggtccagcggctgttgccggtgctgtgccaggcccacggcttgaccccggagcaggtggtggccatcgccagcaatattggtggcaagcaggcgctggagacggtgcaggcgctgttgccggtgctgtgccaggcccacggcttgaccccggagcaggtggtggccatcgccagcaatattggtggcaagcaggcgctggagacggtgcaggcgctgttgccggtgctgtgccaggcccacggcttgaccccccagcaggtggtggccatcgccagcaataatggtggcaagcaggcgctggagacggtccagcggctgttgccggtgctgtgccaggcccacggcttgaccccggagcaggtggtggccatcgccagccacgatggcggcaagcaggcgctggagacggtccagcggctgttgccggtgctgtgccaggcccacggcttgaccccccagcaggtggtggccatcgccagcaataatggtggcaagcaggcgctggagacggtccagcggctgttgccggtgctgtgccaggcccacggcttgaccccccagcaggtggtggccatcgccagcaataatggtggcaagcaggcgctggagacggtccagcggctgttgccggtgctgtgccaggcccacggcttgaccccccagcaggtggtggccatcgccagcaataatggtggcaagcaggcgctggagacggtccagcggctgttgccggtgctgtgccaggcccacggcttgaccccggagcaggtggtggccatcgccagcaatattggtggcaagcaggcgctggagacggtgcaggcgctgttgccggtgctgtgccaggcccacggcttgaccccggagcaggtggtggccatcgccagcaatattggtggcaagcaggcgctggagacggtgcaggcgctgttgccggtgctgtgccaggcccacggcttgaccccccagcaggtggtggccatcgccagcaataatggtggcaagcaggcgctggagacggtccagcggctgttgccggtgctgtgccaggcccacggcttgaccccccagcaggtggtggccatcgccagcaataatggtggcaagcaggcgctggagacggtccagcggctgttgccggtgctgtgccaggcccacggcttgaccccccagcaggtggtggccatcgccagcaataatggtggcaagcaggcgctggagacggtccagcggctgttgccggtgctgtgccaggcccacggcttgaccccggagcaggtggtggccatcgccagcaatattggtggcaagcaggcgctggagacggtgcaggcgctgttgccggtgctgtgccaggcccacggcttgaccccggagcaggtggtggccatcgccagccacgatggcggcaagcaggcgctggagacggtccagcggctgttgccggtgctgtgccaggcccacggcttgacccctcagcaggtggtggccatcgccagcaatggcggcggcaggccggcgctggagagcattgttgcccagttatctcgccctgatccgtcggccgactgataagtcgaccaccaccaccaccaccactgataagagctcgaatttccccgatcgttcaaacatttggcaataaagtttcttaagattgaatcctgttgccggtcttgcgatgattatcatataatttctgttgaattacgttaagcatgtaataattaacatgtaatgcatgacgttatttatgagatgggtttttatgattagagtcccgcaattatacatttaatacgcgatagaaaacaaaatatagcgcgcaaactaggataaattatcgcgcgcggtgtcatctatgttactagatcgggaattcgtaatcatggtcatagctgtttcctgtgtgaaattgttatccgctcacaattccacacaacatacgagccggaagcataaagtgtaaagcctggggtgcctaatgagtgagctaactcacattaattgcgttgcgctcactgcccgctttccagtcgggaaacctgtcgtgccagctgcattaatgaatcggccaacgcgcggggagaggcggtttgcgtattgggcgctcttccgcttcctcgctcactgactcgctgcgctcggtcgttcggctgcggcgagcggtatcagctcactcaaaggcggtaatacggttatccacagaatcaggggataacgcaggaaagaac

SEQ ID NO: 285 - DNA, 4208 bp, Artificial sequence
  pCLS15785
ggtctttcctgcgttatcccctgattctgtggataaccgtattaccgcctttgagtgagctgataccgctcgccgcagccgaacgaccgagcgcagcgagtcagtgagcgaggaagcggagagcgcccaatacgcaaaccgcctctccccgcgcgttggccgattcattaatgcagctggcacgacaggtttcccgactggaaagcgggcagtgagcgcaacgcaattaatgtgagttagctcactcattaggcaccccaggctttacactttatgcttccggctcgtatgttgtgtggaattgtgagcggataacaatttcacacaggaaacagctatgaccatgattacgccaagcgcgtcaattaaccctcactaaagggaacaaaagctgttaattaaggaggaaacattcatggaactgaagaactccatcagcgattacaccgaagccgagttcgtgcagctgttgaaagaaattgagaaagagaacgttgctgccaccgatgacgtgctggatgttttgctggaacattttgtgaagatcactgaacatccagatggcactgacctgatctactacccgagcgataaccgtgatgacagcccagaaggcattgttaaagagatcaaagaatggagagctgccaacggcaagccaggcttcaaacagggttgacggccaactgatttaattaagcgcgccacacgcaaacacaaatacacagcggccttgccaccatggtggatctacgcacgctcggctacagccagcagcaacaggagaagatcaaaccgaaggttcgttcgacagtggcgcagcaccacgaggcactggtcggccacgggtttacacacgcgcacatcgttgcgttaagccaacacccggcagcgttagggaccgtcgctgtcaagtatcaggacatgatcgcagcgttgccagaggcgacacacgaagcgatcgttggcgtcggcaaacagtggtccggcgcacgcgctctggaggccttgctcacggtggcgggagagttgagaggtccaccgttacagttggacacaggccaacttctcaagattgcaaaacgtggcggcgtgaccgcagtggaggcagtgcatgcatggcgcaatgcactgacgggtgccccgctcaacttgaccggagacgcccgggggatcaggtcacgtgcgtctcggagcattgttgcccagttatctcgccctgatccgggatcctccggatctaaacgcaacaaaccaggtaaggccactggcaaaggtaaaccagtgaacaataagtggctgaacaacgctggcaaagacttgggttctccagtgccggatcgcattgccaacaagctgagagacaaagaattcaagagttttgatgactttcgcgcaaaattctgggaagaagtgtctaaagatccagaactgtctaaacagtttagtcgcaacaacaatgacagaatgaaagttggtaaagctccgaagacccgcacccaagacgtgtctggcaaacgcaccagttttgaattgcatcatgaaaaaccaatctctcagaatggtggcgtttacgacatggacaacatctctgtggttactccgaaaagacatatcgatattcatcgcggtaaaggatccaccggtgactgatcggccgactgataagtcgaccaccaccaccaccaccactgataagagctcctcgagcctgcagcagctgaagctttggacttctggcgcgcccaattcgccctatagtgagtcgtattacgtcgcgctcactggccgtcgttttacaacgtcgtgactgggaaaaccctggcgttacccaacttaatcgccttgcagcacatccccctttcgccagctggcgtaatagcgaagaggcccgcaccgaaacgcccttcccaacagttgcgcagcctgaatggcgaatgggagcgccctgtagcggcgcattaagcgcggcgggtgtggtggttacgcgcagcgtgaccgctacacttgccagcgccctagcgcccgctcctttcgctttcttcccttcctttctcgccacgttcgccggctttccccgtcaagctctaaatcgggggctccctttagggttccgatttagtgctttacggcacctcgaccccaaaaaacttgattagggtgatggttggcctgtagtgggccatagccctgatagacggtttttcgccctttgacgttggagtccacgttctttaatagtggactcttgttccaaactggaacaacactcaaccctatctcggtctattcttttgatttataagggattttgccgatttcggcctattggttaaaaaatgagctgatttaacaaaaatttaacgcgaattttaacaaaatattaacgcttacaatttaggtggcacttttcggggaaatgtgcgcggaacccctatttgtttatttttctaaatacattcaaatatgtatccgctcatgagacaataaccctgataaatgcttcaataatattgaaaaaggaagagtatgagtattcaacatttccgtgtcgcccttattcccttttttgcggcattttgccttcctgtttttgctcacccagaaacgctggtgaaagtaaaagatgctgaagatcagttgggtgcacgagtgggttacatcgaactggatctcaacagcggtaagatccttgagagttttcgccccgaagaacgttttccaatgatgagcacttttaaagttctgctatgtggcgcggtattatcccgtattgacgccgggcaagagcaactcggtcgccgcatacactattctcagaatgacttggttgagtactcaccagtcacagaaaagcatcttacggatggcatgacagtaagagaattatgcagtgctgccataaccatgagtgataacactgcggccaacttacttctgacaacgatcggaggaccgaaggagctaaccgcttttttgcacaacatgggggatcatgtaactcgccttgatcgttgggaaccggagctgaatgaagccataccaaacgacgagcgtgacaccacgatgcctgtagcaatggcaacaacgttgcgcaaactattaactggcgaactacttactctagcttcccggcaacaattaatagactggatggaggcggataaagttgcaggaccacttctgcgctcggcccttccggctggctggtttattgctgataaatctggagccggtgagcgtggttctcgcggtatcattgcagcactggggccagatggtaagccctcccgtatcgtagttatctacacgacggggagtcaggcaactatggatgaacgaaatagacagatcgctgagataggtgcctcactgattaagcattggtaactgtcagaccaagtttactcatatatactttagattgatttaaaacttcatttttaatttaaaaggatctaggtgaagatcctttttgataatctcatgaccaaaatcccttaacgtgagttttcgttccactgagcgtcagaccccgtagaaaagatcaaaggatcttcttgagatcctttttttctgcgcgtaatctgctgcttgcaaacaaaaaaaccaccgctaccagcggtggtttgtttgccggatcaagagctaccaactctttttccgaaggtaactggcttcagcagagcgcagataccaaatactgttcttctagtgtagccgtagttaggccaccacttcaagaactctgtagcaccgcctacatacctcgctctgctaatcctgttaccagtggctgctgccagtggcgataagtcgtgtcttaccgggttggactcaagacgatagttaccggataaggcgcagcggtcgggctgaacggggggttcgtgcacacagcccagcttggagcgaacgacctacaccgaactgagatacctacagcgtgagctatgagaaagcgccacgcttcccgaagggagaaaggcggacaggtatccggtaagcggcagggtcggaacaggagagcgcacgagggagcttccagggggaaacgcctggtatctttatagtcctgtcgggtttcgccacctctgacttgagcgtcgatttttgtgatgctcgtcaggggggcggagcctatggaaaaacgccagcaacgcggcctttttacggttcctggccttttgctggccttttgctcacat

SEQ ID NO: 286 - DNA, 5756 bp, Artificial sequence
  pCLS15786
ggtctttcctgcgttatcccctgattctgtggataaccgtattaccgcctttgagtgagctgataccgctcgccgcagccgaacgaccgagcgcagcgagtcagtgagcgaggaagcggagagcgcccaatacgcaaaccgcctctccccgcgcgttggccgattcattaatgcagctggcacgacaggtttcccgactggaaagcgggcagtgagcgcaacgcaattaatgtgagttagctcactcattaggcaccccaggctttacactttatgcttccggctcgtatgttgtgtggaattgtgagcggataacaatttcacacaggaaacagctatgaccatgattacgccaagcgcgtcaattaaccctcactaaagggaacaaaagctgttaattaaggaggaaacattcatggaactgaagaactccatcagcgattacaccgaagccgagttcgtgcagctgttgaaagaaattgagaaagagaacgttgctgccaccgatgacgtgctggatgttttgctggaacattttgtgaagatcactgaacatccagatggcactgacctgatctactacccgagcgataaccgtgatgacagcccagaaggcattgttaaagagatcaaagaatggagagctgccaacggcaagccaggcttcaaacagggttgacggccaactgatttaattaagcgcgccacacgcaaacacaaatacacagcggccttgccaccatggtggatctacgcacgctcggctacagccagcagcaacaggagaagatcaaaccgaaggttcgttcgacagtggcgcagcaccacgaggcactggtcggccacgggtttacacacgcgcacatcgttgcgttaagccaacacccggcagcgttagggaccgtcgctgtcaagtatcaggacatgatcgcagcgttgccagaggcgacacacgaagcgatcgttggcgtcggcaaacagtggtccggcgcacgcgctctggaggccttgctcacggtggcgggagagttgagaggtccaccgttacagttggacacaggccaacttctcaagattgcaaaacgtggcggcgtgaccgcagtggaggcagtgcatgcatggcgcaatgcactgacgggtgccccgctcaacttgaccccggagcaggtggtggccatcgccagccacgatggcggcaagcaggcgctggagacggtccagcggctgttgccggtgctgtgccaggcccacggcttgaccccggagcaggtggtggccatcgccagccacgatggcggcaagcaggcgctggagacggtccagcggctgttgccggtgctgtgccaggcccacggcttgaccccccagcaggtggtggccatcgccagcaatggcggtggcaagcaggcgctggagacggtccagcggctgttgccggtgctgtgccaggcccacggcttgaccccccagcaggtggtggccatcgccagcaatggcggtggcaagcaggcgctggagacggtccagcggctgttgccggtgctgtgccaggcccacggcttgaccccccagcaggtggtggccatcgccagcaataatggtggcaagcaggcgctggagacggtccagcggctgttgccggtgctgtgccaggcccacggcttgaccccggagcaggtggtggccatcgccagccacgatggcggcaagcaggcgctggagacggtccagcggctgttgccggtgctgtgccaggcccacggcttgaccccccagcaggtggtggccatcgccagcaataatggtggcaagcaggcgctggagacggtccagcggctgttgccggtgctgtgccaggcccacggcttgaccccggagcaggtggtggccatcgccagccacgatggcggcaagcaggcgctggagacggtccagcggctgttgccggtgctgtgccaggcccacggcttgaccccggagcaggtggtggccatcgccagcaatattggtggcaagcaggcgctggagacggtgcaggcgctgttgccggtgctgtgccaggcccacggcttgaccccccagcaggtggtggccatcgccagcaataatggtggcaagcaggcgctggagacggtccagcggctgttgccggtgctgtgccaggcccacggcttgaccccggagcaggtggtggccatcgccagccacgatggcggcaagcaggcgctggagacggtccagcggctgttgccggtgctgtgccaggcccacggcttgaccccccagcaggtggtggccatcgccagcaatggcggtggcaagcaggcgctggagacggtccagcggctgttgccggtgctgtgccaggcccacggcttgaccccccagcaggtggtggccatcgccagcaataatggtggcaagcaggcgctggagacggtccagcggctgttgccggtgctgtgccaggcccacggcttgaccccccagcaggtggtggccatcgccagcaatggcggtggcaagcaggcgctggagacggtccagcggctgttgccggtgctgtgccaggcccacggcttgaccccccagcaggtggtggccatcgccagcaataatggtggcaagcaggcgctggagacggtccagcggctgttgccggtgctgtgccaggcccacggcttgacccctcagcaggtggtggccatcgccagcaatggcggcggcaggccggcgctggagagcattgttgcccagttatctcgccctgatccgggatcctccggatctaaacgcaacaaaccaggtaaggccactggcaaaggtaaaccagtgaacaataagtggctgaacaacgctggcaaagacttgggttctccagtgccggatcgcattgccaacaagctgagagacaaagaattcaagagttttgatgactttcgcgcaaaattctgggaagaagtgtctaaagatccagaactgtctaaacagtttagtcgcaacaacaatgacagaatgaaagttggtaaagctccgaagacccgcacccaagacgtgtctggcaaacgcaccagttttgaattgcatcatgaaaaaccaatctctcagaatggtggcgtttacgacatggacaacatctctgtggttactccgaaaagacatatcgatattcatcgcggtaaaggatccaccggtgactgatcggccgactgataagtcgaccaccaccaccaccaccactgataagagctcctcgagcctgcagcagctgaagctttggacttctggcgcgcccaattcgccctatagtgagtcgtattacgtcgcgctcactggccgtcgttttacaacgtcgtgactgggaaaaccctggcgttacccaacttaatcgccttgcagcacatccccctttcgccagctggcgtaatagcgaagaggcccgcaccgaaacgcccttcccaacagttgcgcagcctgaatggcgaatgggagcgccctgtagcggcgcattaagcgcggcgggtgtggtggttacgcgcagcgtgaccgctacacttgccagcgccctagcgcccgctcctttcgctttcttcccttcctttctcgccacgttcgccggctttccccgtcaagctctaaatcgggggctccctttagggttccgatttagtgctttacggcacctcgaccccaaaaaacttgattagggtgatggttggcctgtagtgggccatagccctgatagacggtttttcgccctttgacgttggagtccacgttctttaatagtggactcttgttccaaactggaacaacactcaaccctatctcggtctattcttttgatttataagggattttgccgatttcggcctattggttaaaaaatgagctgatttaacaaaaatttaacgcgaattttaacaaaatattaacgcttacaatttaggtggcacttttcggggaaatgtgcgcggaacccctatttgtttatttttctaaatacattcaaatatgtatccgctcatgagacaataaccctgataaatgcttcaataatattgaaaaaggaagagtatgagtattcaacatttccgtgtcgcccttattcccttttttgcggcattttgccttcctgtttttgctcacccagaaacgctggtgaaagtaaaagatgctgaagatcagttgggtgcacgagtgggttacatcgaactggatctcaacagcggtaagatccttgagagttttcgccccgaagaacgttttccaatgatgagcacttttaaagttctgctatgtggcgcggtattatcccgtattgacgccgggcaagagcaactcggtcgccgcatacactattctcagaatgacttggttgagtactcaccagtcacagaaaagcatcttacggatggcatgacagtaagagaattatgcagtgctgccataaccatgagtgataacactgcggccaacttacttctgacaacgatcggaggaccgaaggagctaaccgcttttttgcacaacatgggggatcatgtaactcgccttgatcgttgggaaccggagctgaatgaagccataccaaacgacgagcgtgacaccacgatgcctgtagcaatggcaacaacgttgcgcaaactattaactggcgaactacttactctagcttcccggcaacaattaatagactggatggaggcggataaagttgcaggaccacttctgcgctcggcccttccggctggctggtttattgctgataaatctggagccggtgagcgtggttctcgcggtatcattgcagcactggggccagatggtaagccctcccgtatcgtagttatctacacgacggggagtcaggcaactatggatgaacgaaatagacagatcgctgagataggtgcctcactgattaagcattggtaactgtcagaccaagtttactcatatatactttagattgatttaaaacttcatttttaatttaaaaggatctaggtgaagatcctttttgataatctcatgaccaaaatcccttaacgtgagttttcgttccactgagcgtcagaccccgtagaaaagatcaaaggatcttcttgagatcctttttttctgcgcgtaatctgctgcttgcaaacaaaaaaaccaccgctaccagcggtggtttgtttgccggatcaagagctaccaactctttttccgaaggtaactggcttcagcagagcgcagataccaaatactgttcttctagtgtagccgtagttaggccaccacttcaagaactctgtagcaccgcctacatacctcgctctgctaatcctgttaccagtggctgctgccagtggcgataagtcgtgtcttaccgggttggactcaagacgatagttaccggataaggcgcagcggtcgggctgaacggggggttcgtgcacacagcccagcttggagcgaacgacctacaccgaactgagatacctacagcgtgagctatgagaaagcgccacgcttcccgaagggagaaaggcggacaggtatccggtaagcggcagggtcggaacaggagagcgcacgagggagcttccagggggaaacgcctggtatctttatagtcctgtcgggtttcgccacctctgacttgagcgtcgatttttgtgatgctcgtcaggggggcggagcctatggaaaaacgccagcaacgcggcctttttacggttcctggccttttgctggccttttgctcacat

SEQ ID NO: 287 - DNA, 5756 bp, Artificial sequence
  pCLS15787
ggtctttcctgcgttatcccctgattctgtggataaccgtattaccgcctttgagtgagctgataccgctcgccgcagccgaacgaccgagcgcagcgagtcagtgagcgaggaagcggagagcgcccaatacgcaaaccgcctctccccgcgcgttggccgattcattaatgcagctggcacgacaggtttcccgactggaaagcgggcagtgagcgcaacgcaattaatgtgagttagctcactcattaggcaccccaggctttacactttatgcttccggctcgtatgttgtgtggaattgtgagcggataacaatttcacacaggaaacagctatgaccatgattacgccaagcgcgtcaattaaccctcactaaagggaacaaaagctgttaattaaggaggaaacattcatggaactgaagaactccatcagcgattacaccgaagccgagttcgtgcagctgttgaaagaaattgagaaagagaacgttgctgccaccgatgacgtgctggatgttttgctggaacattttgtgaagatcactgaacatccagatggcactgacctgatctactacccgagcgataaccgtgatgacagcccagaaggcattgttaaagagatcaaagaatggagagctgccaacggcaagccaggcttcaaacagggttgacggccaactgatttaattaagcgcgccacacgcaaacacaaatacacagcggccttgccaccatggtggatctacgcacgctcggctacagccagcagcaacaggagaagatcaaaccgaaggttcgttcgacagtggcgcagcaccacgaggcactggtcggccacgggtttacacacgcgcacatcgttgcgttaagccaacacccggcagcgttagggaccgtcgctgtcaagtatcaggacatgatcgcagcgttgccagaggcgacacacgaagcgatcgttggcgtcggcaaacagtggtccggcgcacgcgctctggaggccttgctcacggtggcgggagagttgagaggtccaccgttacagttggacacaggccaacttctcaagattgcaaaacgtggcggcgtgaccgcagtggaggcagtgcatgcatggcgcaatgcactgacgggtgccccgctcaacttgaccccccagcaggtggtggccatcgccagcaataatggtggcaagcaggcgctggagacggtccagcggctgttgccggtgctgtgccaggcccacggcttgaccccggagcaggtggtggccatcgccagcaatattggtggcaagcaggcgctggagacggtgcaggcgctgttgccggtgctgtgccaggcccacggcttgaccccggagcaggtggtggccatcgccagcaatattggtggcaagcaggcgctggagacggtgcaggcgctgttgccggtgctgtgccaggcccacggcttgaccccccagcaggtggtggccatcgccagcaataatggtggcaagcaggcgctggagacggtccagcggctgttgccggtgctgtgccaggcccacggcttgaccccggagcaggtggtggccatcgccagccacgatggcggcaagcaggcgctggagacggtccagcggctgttgccggtgctgtgccaggcccacggcttgaccccccagcaggtggtggccatcgccagcaataatggtggcaagcaggcgctggagacggtccagcggctgttgccggtgctgtgccaggcccacggcttgaccccccagcaggtggtggccatcgccagcaataatggtggcaagcaggcgctggagacggtccagcggctgttgccggtgctgtgccaggcccacggcttgaccccccagcaggtggtggccatcgccagcaataatggtggcaagcaggcgctggagacggtccagcggctgttgccggtgctgtgccaggcccacggcttgaccccggagcaggtggtggccatcgccagcaatattggtggcaagcaggcgctggagacggtgcaggcgctgttgccggtgctgtgccaggcccacggcttgaccccggagcaggtggtggccatcgccagcaatattggtggcaagcaggcgctggagacggtgcaggcgctgttgccggtgctgtgccaggcccacggcttgaccccccagcaggtggtggccatcgccagcaataatggtggcaagcaggcgctggagacggtccagcggctgttgccggtgctgtgccaggcccacggcttgaccccccagcaggtggtggccatcgccagcaataatggtggcaagcaggcgctggagacggtccagcggctgttgccggtgctgtgccaggcccacggcttgaccccccagcaggtggtggccatcgccagcaataatggtggcaagcaggcgctggagacggtccagcggctgttgccggtgctgtgccaggcccacggcttgaccccggagcaggtggtggccatcgccagcaatattggtggcaagcaggcgctggagacggtgcaggcgctgttgccggtgctgtgccaggcccacggcttgaccccggagcaggtggtggccatcgccagccacgatggcggcaagcaggcgctggagacggtccagcggctgttgccggtgctgtgccaggcccacggcttgacccctcagcaggtggtggccatcgccagcaatggcggcggcaggccggcgctggagagcattgttgcccagttatctcgccctgatccgggatcctccggatctaaacgcaacaaaccaggtaaggccactggcaaaggtaaaccagtgaacaataagtggctgaacaacgctggcaaagacttgggttctccagtgccggatcgcattgccaacaagctgagagacaaagaattcaagagttttgatgactttcgcgcaaaattctgggaagaagtgtctaaagatccagaactgtctaaacagtttagtcgcaacaacaatgacagaatgaaagttggtaaagctccgaagacccgcacccaagacgtgtctggcaaacgcaccagttttgaattgcatcatgaaaaaccaatctctcagaatggtggcgtttacgacatggacaacatctctgtggttactccgaaaagacatatcgatattcatcgcggtaaaggatccaccggtgactgatcggccgactgataagtcgaccaccaccaccaccaccactgataagagctcctcgagcctgcagcagctgaagctttggacttctggcgcgcccaattcgccctatagtgagtcgtattacgtcgcgctcactggccgtcgttttacaacgtcgtgactgggaaaaccctggcgttacccaacttaatcgccttgcagcacatccccctttcgccagctggcgtaatagcgaagaggcccgcaccgaaacgcccttcccaacagttgcgcagcctgaatggcgaatgggagcgccctgtagcggcgcattaagcgcggcgggtgtggtggttacgcgcagcgtgaccgctacacttgccagcgccctagcgcccgctcctttcgctttcttcccttcctttctcgccacgttcgccggctttccccgtcaagctctaaatcgggggctccctttagggttccgatttagtgctttacggcacctcgaccccaaaaaacttgattagggtgatggttggcctgtagtgggccatagccctgatagacggtttttcgccctttgacgttggagtccacgttctttaatagtggactcttgttccaaactggaacaacactcaaccctatctcggtctattcttttgatttataagggattttgccgatttcggcctattggttaaaaaatgagctgatttaacaaaaatttaacgcgaattttaacaaaatattaacgcttacaatttaggtggcacttttcggggaaatgtgcgcggaacccctatttgtttatttttctaaatacattcaaatatgtatccgctcatgagacaataaccctgataaatgcttcaataatattgaaaaaggaagagtatgagtattcaacatttccgtgtcgcccttattcccttttttgcggcattttgccttcctgtttttgctcacccagaaacgctggtgaaagtaaaagatgctgaagatcagttgggtgcacgagtgggttacatcgaactggatctcaacagcggtaagatccttgagagttttcgccccgaagaacgttttccaatgatgagcacttttaaagttctgctatgtggcgcggtattatcccgtattgacgccgggcaagagcaactcggtcgccgcatacactattctcagaatgacttggttgagtactcaccagtcacagaaaagcatcttacggatggcatgacagtaagagaattatgcagtgctgccataaccatgagtgataacactgcggccaacttacttctgacaacgatcggaggaccgaaggagctaaccgcttttttgcacaacatgggggatcatgtaactcgccttgatcgttgggaaccggagctgaatgaagccataccaaacgacgagcgtgacaccacgatgcctgtagcaatggcaacaacgttgcgcaaactattaactggcgaactacttactctagcttcccggcaacaattaatagactggatggaggcggataaagttgcaggaccacttctgcgctcggcccttccggctggctggtttattgctgataaatctggagccggtgagcgtggttctcgcggtatcattgcagcactggggccagatggtaagccctcccgtatcgtagttatctacacgacggggagtcaggcaactatggatgaacgaaatagacagatcgctgagataggtgcctcactgattaagcattggtaactgtcagaccaagtttactcatatatactttagattgatttaaaacttcatttttaatttaaaaggatctaggtgaagatcctttttgataatctcatgaccaaaatcccttaacgtgagttttcgttccactgagcgtcagaccccgtagaaaagatcaaaggatcttcttgagatcctttttttctgcgcgtaatctgctgcttgcaaacaaaaaaaccaccgctaccagcggtggtttgtttgccggatcaagagctaccaactctttttccgaaggtaactggcttcagcagagcgcagataccaaatactgttcttctagtgtagccgtagttaggccaccacttcaagaactctgtagcaccgcctacatacctcgctctgctaatcctgttaccagtggctgctgccagtggcgataagtcgtgtcttaccgggttggactcaagacgatagttaccggataaggcgcagcggtcgggctgaacggggggttcgtgcacacagcccagcttggagcgaacgacctacaccgaactgagatacctacagcgtgagctatgagaaagcgccacgcttcccgaagggagaaaggcggacaggtatccggtaagcggcagggtcggaacaggagagcgcacgagggagcttccagggggaaacgcctggtatctttatagtcctgtcgggtttcgccacctctgacttgagcgtcgatttttgtgatgctcgtcaggggggcggagcctatggaaaaacgccagcaacgcggcctttttacggttcctggccttttgctggccttttgctcacat

SEQ ID NO: 288 - DNA, 6867 bp, Artificial sequence
  pCLS14584
atgtgagcaaaaggccagcaaaaggccaggaaccgtaaaaaggccgcgttgctggcgtttttccataggctccgcccccctgacgagcatcacaaaaatcgacgctcaagtcagaggtggcgaaacccgacaggactataaagataccaggcgtttccccctggaagctccctcgtgcgctctcctgttccgaccctgccgcttaccggatacctgtccgcctttctcccttcgggaagcgtggcgctttctcatagctcacgctgtaggtatctcagttcggtgtaggtcgttcgctccaagctgggctgtgtgcacgaaccccccgttcagcccgaccgctgcgccttatccggtaactatcgtcttgagtccaacccggtaagacacgacttatcgccactggcagcagccactggtaacaggattagcagagcgaggtatgtaggcggtgctacagagttcttgaagtggtggcctaactacggctacactagaaggacagtatttggtatctgcgctctgctgaagccagttaccttcggaaaaagagttggtagctcttgatccggcaaacaaaccaccgctggtagcggtggtttttttgtttgcaagcagcagattacgcgcagaaaaaaaggatctcaagaagatcctttgatcttttctacggggtctgacgctcagtggaacgaaaactcacgttaagggattttggtcatgagattatcaaaaaggatcttcacctagatccttttaaattaaaaatgaagttttaaatcaatctaaagtatatatgagtaaacttggtctgacagttaccaatgcttaatcagtgaggcacctatctcagcgatctgtctatttcgttcatccatagttgcctgactccccgtcgtgtagataactacgatacgggagggcttaccatctggccccagtgctgcaatgataccgcgagacccacgctcaccggctccagatttatcagcaataaaccagccagccggaagggccgagcgcagaagtggtcctgcaactttatccgcctccatccagtctattaattgttgccgggaagctagagtaagtagttcgccagttaatagtttgcgcaacgttgttgccattgctacaggcatcgtggtgtcacgctcgtcgtttggtatggcttcattcagctccggttcccaacgatcaaggcgagttacatgatcccccatgttgtgcaaaaaagcggttagctccttcggtcctccgatcgttgtcagaagtaagttggccgcagtgttatcactcatggttatggcagcactgcataattctcttactgtcatgccatccgtaagatgcttttctgtgactggtgagtactcaaccaagtcattctgagaatagtgtatgcggcgaccgagttgctcttgcccggcgtcaatacgggataataccgcgccacatagcagaactttaaaagtgctcatcattggaaaacgttcttcggggcgaaaactctcaaggatcttaccgctgttgagatccagttcgatgtaacccactcgtgcacccaactgatcttcagcatcttttactttcaccagcgtttctgggtgagcaaaaacaggaaggcaaaatgccgcaaaaaagggaataagggcgacacggaaatgttgaatactcatactcttcctttttcaatattattgaagcatttatcagggttattgtctcatgagcggatacatatttgaatgtatttagaaaaataaacaaataggggttccgcgcacatttccccgaaaagtgccacctgacgtctaagaaaccattattatcatgacattaacctataaaaataggcgtatcacgaggccctttcgtctcgcgcgtttcggtgatgacggtgaaaacctctgacacatgcagctcccggagacggtcacagcttgtctgtaagcggatgccgggagcagacaagcccgtcagggcgcgtcagcgggtgttggcgggtgtcggggctggcttaactatgcggcatcagagcagattgtactgagagtgcaccatatgcggtgtgaaataccgcacagatgcgtaaggagaaaataccgcatcaggcgccattcgccattcaggctgcgcaactgttgggaagggcgatcggtgcgggcctcttcgctattacgccagctggcgaaagggggatgtgctgcaaggcgattaagttgggtaacgccagggttttcccagtcacgacgttgtaaaacgacggccagtgccaagcttgcatgcctgcagtgcagcgtgaccaaatctcagaattccaatcccacaaaaatctgagcttaacagcacagttgctcctctcagagcagaatcgggtattcaacaccctcatatcaactactacgttgtgtataacggtccacatgccggtatatacgatgactggggttgtacaaaggcggcaacaaacggcgttcccggagttgcacacaagaaatttgccactattacagaggcaagagcagcagctgacgcgtacacaacaagtcagcaaacagacaggttgaacttcatccccaaaggagaagctcaactcaagcccaagagctttgctaaggccctaacaagcccaccaaagcaaaaagcccactggctcacgctaggaaccaaaaggcccagcagtgatccagccccaaaagagatctcctttgccccggagattacaatggacgatttcctctatctttacgatctaggaaggaagttcgaaggtgaaggtgacgacactatgttcaccactgataatgagaaggttagcctcttcaatttcagaaagaatgctgacccacagatggttagagaggcctacgcagcaggtctcatcaagacgatctacccgagtaacaatctccaggagatcaaataccttcccaagaaggttaaagatgcagtcaaaagattcaggactaattgcatcaagaacacagagaaagacatatttctcaagatcagaagtactattccagtatggacgattcaaggcttgcttcataaaccaaggcaagtaatagagattggagtctctaaaaaggtagttcctactgaatctaaggccatgcatggagtctaagattcaaatcgaggatctaacagaactcgccgtgaagactggcgaacagttcatacagagtcttttacgactcaatgacaagaagaaaatcttcgtcaacatggtggagcacgacactctggtctactccaaaaatgtcaaagatacagtctcagaagaccaaagggctattgagacttttcaacaaaggataatttcgggaaacctcctcggattccattgcccagctatctgtcacttcatcgaaaggacagtagaaaaggaaggtggctcctacaaatgccatcattgcgataaaggaaaggctatcattcaagatctctctgccgacagtggtcccaaagatggacccccacccacgaggagcatcgtggaaaaagaagacgttccaaccacgtcttcaaagcaagtggattgatgtgacatctccactgacgtaagggatgacgcacaatcccactatccttcgcaagacccttcctctatataaggaagttcatttcatttggagaggacacgcacgagatctgcaggtcgactctagaggatcccctcgaggcgcgccacacgcaaacacaaatacacagcggccttgccaccatggtggatctacgcacgctcggctacagccagcagcaacaggagaagatcaaaccgaaggttcgttcgacagtggcgcagcaccacgaggcactggtcggccacgggtttacacacgcgcacatcgttgcgttaagccaacacccggcagcgttagggaccgtcgctgtcaagtatcaggacatgatcgcagcgttgccagaggcgacacacgaagcgatcgttggcgtcggcaaacagtggtccggcgcacgcgctctggaggccttgctcacggtggcgggagagttgagaggtccaccgttacagttggacacaggccaacttctcaagattgcaaaacgtggcggcgtgaccgcagtggaggcagtgcatgcatggcgcaatgcactgacgggtgccccgctcaacttgaccccggagcaggtggtggccatcgccagccacgatggcggcaagcaggcgctggagacggtccagcggctgttgccggtgctgtgccaggcccacggcttgaccccggagcaggtggtggccatcgccagccacgatggcggcaagcaggcgctggagacggtccagcggctgttgccggtgctgtgccaggcccacggcttgaccccccagcaggtggtggccatcgccagcaatggcggtggcaagcaggcgctggagacggtccagcggctgttgccggtgctgtgccaggcccacggcttgaccccccagcaggtggtggccatcgccagcaatggcggtggcaagcaggcgctggagacggtccagcggctgttgccggtgctgtgccaggcccacggcttgaccccccagcaggtggtggccatcgccagcaataatggtggcaagcaggcgctggagacggtccagcggctgttgccggtgctgtgccaggcccacggcttgaccccggagcaggtggtggccatcgccagccacgatggcggcaagcaggcgctggagacggtccagcggctgttgccggtgctgtgccaggcccacggcttgaccccccagcaggtggtggccatcgccagcaataatggtggcaagcaggcgctggagacggtccagcggctgttgccggtgctgtgccaggcccacggcttgaccccggagcaggtggtggccatcgccagccacgatggcggcaagcaggcgctggagacggtccagcggctgttgccggtgctgtgccaggcccacggcttgaccccggagcaggtggtggccatcgccagcaatattggtggcaagcaggcgctggagacggtgcaggcgctgttgccggtgctgtgccaggcccacggcttgaccccccagcaggtggtggccatcgccagcaataatggtggcaagcaggcgctggagacggtccagcggctgttgccggtgctgtgccaggcccacggcttgaccccggagcaggtggtggccatcgccagccacgatggcggcaagcaggcgctggagacggtccagcggctgttgccggtgctgtgccaggcccacggcttgaccccccagcaggtggtggccatcgccagcaatggcggtggcaagcaggcgctggagacggtccagcggctgttgccggtgctgtgccaggcccacggcttgaccccccagcaggtggtggccatcgccagcaataatggtggcaagcaggcgctggagacggtccagcggctgttgccggtgctgtgccaggcccacggcttgaccccccagcaggtggtggccatcgccagcaatggcggtggcaagcaggcgctggagacggtccagcggctgttgccggtgctgtgccaggcccacggcttgaccccccagcaggtggtggccatcgccagcaataatggtggcaagcaggcgctggagacggtccagcggctgttgccggtgctgtgccaggcccacggcttgacccctcagcaggtggtggccatcgccagcaatggcggcggcaggccggcgctggagagcattgttgcccagttatctcgccctgatccgggatcctccggatctaaacgcaacaaaccaggtaaggccactggcaaaggtaaaccagtgaacaataagtggctgaacaacgctggcaaagacttgggttctccagtgccggatcgcattgccaacaagctgagagacaaagaattcaagagttttgatgactttcgcgcaaaattctgggaagaagtgtctaaagatccagaactgtctaaacagtttagtcgcaacaacaatgacagaatgaaagttggtaaagctccgaagacccgcacccaagacgtgtctggcaaacgcaccagttttgaattgcatcatgaaaaaccaatctctcagaatggtggcgtttacgacatggacaacatctctgtggttactccgaaaagacatatcgatattcatcgcggtaaaggatccaccggtgactgatcggccgactgataagtcgaccaccaccaccaccaccactgataagagctcgaatttccccgatcgttcaaacatttggcaataaagtttcttaagattgaatcctgttgccggtcttgcgatgattatcatataatttctgttgaattacgttaagcatgtaataattaacatgtaatgcatgacgttatttatgagatgggtttttatgattagagtcccgcaattatacatttaatacgcgatagaaaacaaaatatagcgcgcaaactaggataaattatcgcgcgcggtgtcatctatgttactagatcgggaattcgtaatcatggtcatagctgtttcctgtgtgaaattgttatccgctcacaattccacacaacatacgagccggaagcataaagtgtaaagcctggggtgcctaatgagtgagctaactcacattaattgcgttgcgctcactgcccgctttccagtcgggaaacctgtcgtgccagctgcattaatgaatcggccaacgcgcggggagaggcggtttgcgtattgggcgctcttccgcttcctcgctcactgactcgctgcgctcggtcgttcggctgcggcgagcggtatcagctcactcaaaggcggtaatacggttatccacagaatcaggggataacgcaggaaagaac

SEQ ID NO: 289 - DNA, 6867 bp, Artificial sequence
  pCLS14587
atgtgagcaaaaggccagcaaaaggccaggaaccgtaaaaaggccgcgttgctggcgtttttccataggctccgcccccctgacgagcatcacaaaaatcgacgctcaagtcagaggtggcgaaacccgacaggactataaagataccaggcgtttccccctggaagctccctcgtgcgctctcctgttccgaccctgccgcttaccggatacctgtccgcctttctcccttcgggaagcgtggcgctttctcatagctcacgctgtaggtatctcagttcggtgtaggtcgttcgctccaagctgggctgtgtgcacgaaccccccgttcagcccgaccgctgcgccttatccggtaactatcgtcttgagtccaacccggtaagacacgacttatcgccactggcagcagccactggtaacaggattagcagagcgaggtatgtaggcggtgctacagagttcttgaagtggtggcctaactacggctacactagaaggacagtatttggtatctgcgctctgctgaagccagttaccttcggaaaaagagttggtagctcttgatccggcaaacaaaccaccgctggtagcggtggtttttttgtttgcaagcagcagattacgcgcagaaaaaaaggatctcaagaagatcctttgatcttttctacggggtctgacgctcagtggaacgaaaactcacgttaagggattttggtcatgagattatcaaaaaggatcttcacctagatccttttaaattaaaaatgaagttttaaatcaatctaaagtatatatgagtaaacttggtctgacagttaccaatgcttaatcagtgaggcacctatctcagcgatctgtctatttcgttcatccatagttgcctgactccccgtcgtgtagataactacgatacgggagggcttaccatctggccccagtgctgcaatgataccgcgagacccacgctcaccggctccagatttatcagcaataaaccagccagccggaagggccgagcgcagaagtggtcctgcaactttatccgcctccatccagtctattaattgttgccgggaagctagagtaagtagttcgccagttaatagtttgcgcaacgttgttgccattgctacaggcatcgtggtgtcacgctcgtcgtttggtatggcttcattcagctccggttcccaacgatcaaggcgagttacatgatcccccatgttgtgcaaaaaagcggttagctccttcggtcctccgatcgttgtcagaagtaagttggccgcagtgttatcactcatggttatggcagcactgcataattctcttactgtcatgccatccgtaagatgcttttctgtgactggtgagtactcaaccaagtcattctgagaatagtgtatgcggcgaccgagttgctcttgcccggcgtcaatacgggataataccgcgccacatagcagaactttaaaagtgctcatcattggaaaacgttcttcggggcgaaaactctcaaggatcttaccgctgttgagatccagttcgatgtaacccactcgtgcacccaactgatcttcagcatcttttactttcaccagcgtttctgggtgagcaaaaacaggaaggcaaaatgccgcaaaaaagggaataagggcgacacggaaatgttgaatactcatactcttcctttttcaatattattgaagcatttatcagggttattgtctcatgagcggatacatatttgaatgtatttagaaaaataaacaaataggggttccgcgcacatttccccgaaaagtgccacctgacgtctaagaaaccattattatcatgacattaacctataaaaataggcgtatcacgaggccctttcgtctcgcgcgtttcggtgatgacggtgaaaacctctgacacatgcagctcccggagacggtcacagcttgtctgtaagcggatgccgggagcagacaagcccgtcagggcgcgtcagcgggtgttggcgggtgtcggggctggcttaactatgcggcatcagagcagattgtactgagagtgcaccatatgcggtgtgaaataccgcacagatgcgtaaggagaaaataccgcatcaggcgccattcgccattcaggctgcgcaactgttgggaagggcgatcggtgcgggcctcttcgctattacgccagctggcgaaagggggatgtgctgcaaggcgattaagttgggtaacgccagggttttcccagtcacgacgttgtaaaacgacggccagtgccaagcttgcatgcctgcagtgcagcgtgaccaaatctcagaattccaatcccacaaaaatctgagcttaacagcacagttgctcctctcagagcagaatcgggtattcaacaccctcatatcaactactacgttgtgtataacggtccacatgccggtatatacgatgactggggttgtacaaaggcggcaacaaacggcgttcccggagttgcacacaagaaatttgccactattacagaggcaagagcagcagctgacgcgtacacaacaagtcagcaaacagacaggttgaacttcatccccaaaggagaagctcaactcaagcccaagagctttgctaaggccctaacaagcccaccaaagcaaaaagcccactggctcacgctaggaaccaaaaggcccagcagtgatccagccccaaaagagatctcctttgccccggagattacaatggacgatttcctctatctttacgatctaggaaggaagttcgaaggtgaaggtgacgacactatgttcaccactgataatgagaaggttagcctcttcaatttcagaaagaatgctgacccacagatggttagagaggcctacgcagcaggtctcatcaagacgatctacccgagtaacaatctccaggagatcaaataccttcccaagaaggttaaagatgcagtcaaaagattcaggactaattgcatcaagaacacagagaaagacatatttctcaagatcagaagtactattccagtatggacgattcaaggcttgcttcataaaccaaggcaagtaatagagattggagtctctaaaaaggtagttcctactgaatctaaggccatgcatggagtctaagattcaaatcgaggatctaacagaactcgccgtgaagactggcgaacagttcatacagagtcttttacgactcaatgacaagaagaaaatcttcgtcaacatggtggagcacgacactctggtctactccaaaaatgtcaaagatacagtctcagaagaccaaagggctattgagacttttcaacaaaggataatttcgggaaacctcctcggattccattgcccagctatctgtcacttcatcgaaaggacagtagaaaaggaaggtggctcctacaaatgccatcattgcgataaaggaaaggctatcattcaagatctctctgccgacagtggtcccaaagatggacccccacccacgaggagcatcgtggaaaaagaagacgttccaaccacgtcttcaaagcaagtggattgatgtgacatctccactgacgtaagggatgacgcacaatcccactatccttcgcaagacccttcctctatataaggaagttcatttcatttggagaggacacgcacgagatctgcaggtcgactctagaggatcccctcgaggcgcgccacacgcaaacacaaatacacagcggccttgccaccatggtggatctacgcacgctcggctacagccagcagcaacaggagaagatcaaaccgaaggttcgttcgacagtggcgcagcaccacgaggcactggtcggccacgggtttacacacgcgcacatcgttgcgttaagccaacacccggcagcgttagggaccgtcgctgtcaagtatcaggacatgatcgcagcgttgccagaggcgacacacgaagcgatcgttggcgtcggcaaacagtggtccggcgcacgcgctctggaggccttgctcacggtggcgggagagttgagaggtccaccgttacagttggacacaggccaacttctcaagattgcaaaacgtggcggcgtgaccgcagtggaggcagtgcatgcatggcgcaatgcactgacgggtgccccgctcaacttgaccccccagcaggtggtggccatcgccagcaataatggtggcaagcaggcgctggagacggtccagcggctgttgccggtgctgtgccaggcccacggcttgaccccggagcaggtggtggccatcgccagcaatattggtggcaagcaggcgctggagacggtgcaggcgctgttgccggtgctgtgccaggcccacggcttgaccccggagcaggtggtggccatcgccagcaatattggtggcaagcaggcgctggagacggtgcaggcgctgttgccggtgctgtgccaggcccacggcttgaccccccagcaggtggtggccatcgccagcaataatggtggcaagcaggcgctggagacggtccagcggctgttgccggtgctgtgccaggcccacggcttgaccccggagcaggtggtggccatcgccagccacgatggcggcaagcaggcgctggagacggtccagcggctgttgccggtgctgtgccaggcccacggcttgaccccccagcaggtggtggccatcgccagcaataatggtggcaagcaggcgctggagacggtccagcggctgttgccggtgctgtgccaggcccacggcttgaccccccagcaggtggtggccatcgccagcaataatggtggcaagcaggcgctggagacggtccagcggctgttgccggtgctgtgccaggcccacggcttgaccccccagcaggtggtggccatcgccagcaataatggtggcaagcaggcgctggagacggtccagcggctgttgccggtgctgtgccaggcccacggcttgaccccggagcaggtggtggccatcgccagcaatattggtggcaagcaggcgctggagacggtgcaggcgctgttgccggtgctgtgccaggcccacggcttgaccccggagcaggtggtggccatcgccagcaatattggtggcaagcaggcgctggagacggtgcaggcgctgttgccggtgctgtgccaggcccacggcttgaccccccagcaggtggtggccatcgccagcaataatggtggcaagcaggcgctggagacggtccagcggctgttgccggtgctgtgccaggcccacggcttgaccccccagcaggtggtggccatcgccagcaataatggtggcaagcaggcgctggagacggtccagcggctgttgccggtgctgtgccaggcccacggcttgaccccccagcaggtggtggccatcgccagcaataatggtggcaagcaggcgctggagacggtccagcggctgttgccggtgctgtgccaggcccacggcttgaccccggagcaggtggtggccatcgccagcaatattggtggcaagcaggcgctggagacggtgcaggcgctgttgccggtgctgtgccaggcccacggcttgaccccggagcaggtggtggccatcgccagccacgatggcggcaagcaggcgctggagacggtccagcggctgttgccggtgctgtgccaggcccacggcttgacccctcagcaggtggtggccatcgccagcaatggcggcggcaggccggcgctggagagcattgttgcccagttatctcgccctgatccgggatcctccggatctaaacgcaacaaaccaggtaaggccactggcaaaggtaaaccagtgaacaataagtggctgaacaacgctggcaaagacttgggttctccagtgccggatcgcattgccaacaagctgagagacaaagaattcaagagttttgatgactttcgcgcaaaattctgggaagaagtgtctaaagatccagaactgtctaaacagtttagtcgcaacaacaatgacagaatgaaagttggtaaagctccgaagacccgcacccaagacgtgtctggcaaacgcaccagttttgaattgcatcatgaaaaaccaatctctcagaatggtggcgtttacgacatggacaacatctctgtggttactccgaaaagacatatcgatattcatcgcggtaaaggatccaccggtgactgatcggccgactgataagtcgaccaccaccaccaccaccactgataagagctcgaatttccccgatcgttcaaacatttggcaataaagtttcttaagattgaatcctgttgccggtcttgcgatgattatcatataatttctgttgaattacgttaagcatgtaataattaacatgtaatgcatgacgttatttatgagatgggtttttatgattagagtcccgcaattatacatttaatacgcgatagaaaacaaaatatagcgcgcaaactaggataaattatcgcgcgcggtgtcatctatgttactagatcgggaattcgtaatcatggtcatagctgtttcctgtgtgaaattgttatccgctcacaattccacacaacatacgagccggaagcataaagtgtaaagcctggggtgcctaatgagtgagctaactcacattaattgcgttgcgctcactgcccgctttccagtcgggaaacctgtcgtgccagctgcattaatgaatcggccaacgcgcggggagaggcggtttgcgtattgggcgctcttccgcttcctcgctcactgactcgctgcgctcggtcgttcggctgcggcgagcggtatcagctcactcaaaggcggtaatacggttatccacagaatcaggggataacgcaggaaagaac

SEQ ID NO: 290 - DNA, 220 bp, Artificial sequence
  TCRB gene region
gccaacagtgtcctaccagcaaggggtcctgtctgccaccatcctctatgagatcctgctagggaaggccaccctgtatgctgtgctggtcagcgcccttgtgttgatggccatggtaagcaggagggcaggatggggccagcaggctggaggtgacacactgacaccaagcacccagaagtatagagtccctgccaggattggagctgggcagtaggga

SEQ ID NO: 291 - protein, 349 aa, Artificial sequence
  pCLS6857
MANTKYNEEFLLYLAGFVDGDGSIVAQIKPHQSCKFKHQLRLTFNVTQKTQRRWFLDKLVDEIGVGHVYDSGSVSYYQLSEIKPLHNFLTQLQPFLELKQKQANLVLKIIEQLPSAKESPDKFLEVCTWVDQVAALNDSKTRKTTSETVRAVLDSLSEKKKSSPAAGDSSVSNSEHIAPLSLPSSPPSVGSNKKFLLYLAGFVDSDGSIIAQIKPNQSYKFKHYLSLTFCVTQKTQRRWFLDKLVDRIGVGYVQDRGSVSDYRLSEIKPLRNFLTQLQPFLKLKQKQANLVLKIIEQLPSAKESPDKFLEVCTWVDQVAALNDSKTRKTTSETVRAVLDSLSEKKKSSP

SEQ ID NO: 292 - DNA, 4541 bp, Artificial sequence
  pCLS15788
ggtctttcctgcgttatcccctgattctgtggataaccgtattaccgcctttgagtgagctgataccgctcgccgcagccgaacgaccgagcgcagcgagtcagtgagcgaggaagcggagagcgcccaatacgcaaaccgcctctccccgcgcgttggccgattcattaatgcagctggcacgacaggtttcccgactggaaagcgggcagtgagcgcaacgcaattaatgtgagttagctcactcattaggcaccccaggctttacactttatgcttccggctcgtatgttgtgtggaattgtgagcggataacaatttcacacaggaaacagctatgaccatgattacgccaagcgcgtcaattaaccctcactaaagggaacaaaagctgttaattaagcgcgccacacgcaaacacaaatacacagcggccttgccaccatggtggatctacgcacgctcggctacagccagcagcaacaggagaagatcaaaccgaaggttcgttcgacagtggcgcagcaccacgaggcactggtcggccacgggtttacacacgcgcacatcgttgcgttaagccaacacccggcagcgttagggaccgtcgctgtcaagtatcaggacatgatcgcagcgttgccagaggcgacacacgaagcgatcgttggcgtcggcaaacagtggtccggcgcacgcgctctggaggccttgctcacggtggcgggagagttgagaggtccaccgttacagttggacacaggccaacttctcaagattgcaaaacgtggcggcgtgaccgcagtggaggcagtgcatgcatggcgcaatgcactgacgggtgccccgctcaacttgaccggagacgcccgggggatcaggtcacgtgcgtctcggagcattgttgcccagttatctcgccctgatccgggatccgacatcaccaaatctaaaatctctgaaaagatgaaaggccagggcccatccggaaataccaaatataacgaagagttcctgctgtacctggccggctttgtggacggtgacggtagcatcgttgctcagattaaaccacatcagtcttgtaagtttaaacatcagctacgtttgacctttaacgtgactcaaaagacccagcgccgttggtttctggacaaactagtggatgaaattggcgttggtcatgtatacgattctggtagcgtttcctactaccagttaagcgaaatcaagccgctgcacaacttcctgactcaactgcagccgtttctggaactgaaacagaaacaggcaaacctggttctgaaaattatcgaacagctgccgtctgcaaaagaatccccggacaaattcctggaagtttgtacctgggtggatcaggttgcagctctgaacgattctaagacgcgtaaaaccacttctgaaaccgttcgtgctgtgctggacagcctgagcgagaagaagaaatcctccccggcggccggtgattcctctgtttctaattccgagcacattgctcctctgtctctgccttcctctcctccatctgttggttctaacaaaaaattcctgctgtatcttgctggatttgtggattctgatggctccatcattgctcagataaaaccaaatcaatcttacaagttcaaacactacctctccttgaccttttgtgtcactcagaagacacaaagaaggtggttcttggacaaattggttgatcgtattggtgtgggctatgtccaggacagaggctctgtgtcagactaccgtctgtctgaaattaagcctcttcgtaactttctcacccaactgcaacccttcttgaagctcaaacagaagcaagcaaatctggttttgaaaatcatcgagcaactgccatctgccaaggagtcccctgacaagtttcttgaagtgtgtacttgggtggatcaggttgctgccttgaatgactccaagaccagaaaaaccacctctgagactgtgagggcagttctggatagcctctctgagaagaaaaagtcctctccttagtaactcgagcctgcagcagctgaagctttggacttctggcgcgcccaattcgccctatagtgagtcgtattacgtcgcgctcactggccgtcgttttacaacgtcgtgactgggaaaaccctggcgttacccaacttaatcgccttgcagcacatccccctttcgccagctggcgtaatagcgaagaggcccgcaccgaaacgcccttcccaacagttgcgcagcctgaatggcgaatgggagcgccctgtagcggcgcattaagcgcggcgggtgtggtggttacgcgcagcgtgaccgctacacttgccagcgccctagcgcccgctcctttcgctttcttcccttcctttctcgccacgttcgccggctttccccgtcaagctctaaatcgggggctccctttagggttccgatttagtgctttacggcacctcgaccccaaaaaacttgattagggtgatggttggcctgtagtgggccatagccctgatagacggtttttcgccctttgacgttggagtccacgttctttaatagtggactcttgttccaaactggaacaacactcaaccctatctcggtctattcttttgatttataagggattttgccgatttcggcctattggttaaaaaatgagctgatttaacaaaaatttaacgcgaattttaacaaaatattaacgcttacaatttaggtggcacttttcggggaaatgtgcgcggaacccctatttgtttatttttctaaatacattcaaatatgtatccgctcatgagacaataaccctgataaatgcttcaataatattgaaaaaggaagagtatgagtattcaacatttccgtgtcgcccttattcccttttttgcggcattttgccttcctgtttttgctcacccagaaacgctggtgaaagtaaaagatgctgaagatcagttgggtgcacgagtgggttacatcgaactggatctcaacagcggtaagatccttgagagttttcgccccgaagaacgttttccaatgatgagcacttttaaagttctgctatgtggcgcggtattatcccgtattgacgccgggcaagagcaactcggtcgccgcatacactattctcagaatgacttggttgagtactcaccagtcacagaaaagcatcttacggatggcatgacagtaagagaattatgcagtgctgccataaccatgagtgataacactgcggccaacttacttctgacaacgatcggaggaccgaaggagctaaccgcttttttgcacaacatgggggatcatgtaactcgccttgatcgttgggaaccggagctgaatgaagccataccaaacgacgagcgtgacaccacgatgcctgtagcaatggcaacaacgttgcgcaaactattaactggcgaactacttactctagcttcccggcaacaattaatagactggatggaggcggataaagttgcaggaccacttctgcgctcggcccttccggctggctggtttattgctgataaatctggagccggtgagcgtggttctcgcggtatcattgcagcactggggccagatggtaagccctcccgtatcgtagttatctacacgacggggagtcaggcaactatggatgaacgaaatagacagatcgctgagataggtgcctcactgattaagcattggtaactgtcagaccaagtttactcatatatactttagattgatttaaaacttcatttttaatttaaaaggatctaggtgaagatcctttttgataatctcatgaccaaaatcccttaacgtgagttttcgttccactgagcgtcagaccccgtagaaaagatcaaaggatcttcttgagatcctttttttctgcgcgtaatctgctgcttgcaaacaaaaaaaccaccgctaccagcggtggtttgtttgccggatcaagagctaccaactctttttccgaaggtaactggcttcagcagagcgcagataccaaatactgttcttctagtgtagccgtagttaggccaccacttcaagaactctgtagcaccgcctacatacctcgctctgctaatcctgttaccagtggctgctgccagtggcgataagtcgtgtcttaccgggttggactcaagacgatagttaccggataaggcgcagcggtcgggctgaacggggggttcgtgcacacagcccagcttggagcgaacgacctacaccgaactgagatacctacagcgtgagctatgagaaagcgccacgcttcccgaagggagaaaggcggacaggtatccggtaagcggcagggtcggaacaggagagcgcacgagggagcttccagggggaaacgcctggtatctttatagtcctgtcgggtttcgccacctctgacttgagcgtcgatttttgtgatgctcgtcaggggggcggagcctatggaaaaacgccagcaacgcggcctttttacggttcctggccttttgctggccttttgctcacat

SEQ ID NO: 293 - protein, 349 aa, Artificial sequence
  pCLS12083
MANTKYNEEFLLYLAGFVDGDGSIVAQIKPHQSCKFKHQLRLTFNVTQKTQRRWFLDKLVDEIGVGHVYDSGSVSYYQLSEIKPLHNFLTQLQPFLELKQKQANLVLKIIEQLPSAKESPDKFLEVCTWVDQVAALNDSKTRKTTSETCRAVLDSLSEKKKSSPAAGDSSVSNSEHIAPLSLPSSPPSVGSNKKFLLYLAGFVDSDGSIIAQIKPNQSYKFKHYLSLTFCVTQKTQRRWFLDKLVDRIGVGYVQDRGSVSDYRLSEIKPLRNFLTQLQPFLKLKQKQANLVLKIIEQLPSAKESPDKFLEVCTWVDQVAALNDSKTRKTTSETVRAVLDSLSEKKKSSP

SEQ ID NO: 294 - protein, 349 aa, Artificial sequence
  pCLS12195
MANTKYNEEFLLYLAGFVDGDGSIVAQIKPHQSCKFKHQLRLTFNVTQKTQRRWFLDKLVDEIGVGHVYDSGSVSYYQLSEIKPLHNFLTQLQPFLELKQKQANLVLKIIEQLPSAKESPDKFLEVCTWVDQVAALNDSKTRKTTSETVRAVLDSLSEKKKSSPAAGDSSVSNSEHIAPLSLPSSPPSVGSNKKFLLYLAGFVDSDGSIIAQIKPNQSYKFKHYLSLTFCVTQKTQRRWFLDKLVDRIGVGYVQDRGSVSDYRLSEIKPLRNFLTQLQPFLKLKQKQANLVLKIIEQLPSAKESPDKFLEVCTWVDQVAALNDSKTRKTTSETCRAVLDSLSEKKKSSP

SEQ ID NO: 295 - DNA, 4541 bp, Artificial sequence
  pCLS15789
ggtctttcctgcgttatcccctgattctgtggataaccgtattaccgcctttgagtgagctgataccgctcgccgcagccgaacgaccgagcgcagcgagtcagtgagcgaggaagcggagagcgcccaatacgcaaaccgcctctccccgcgcgttggccgattcattaatgcagctggcacgacaggtttcccgactggaaagcgggcagtgagcgcaacgcaattaatgtgagttagctcactcattaggcaccccaggctttacactttatgcttccggctcgtatgttgtgtggaattgtgagcggataacaatttcacacaggaaacagctatgaccatgattacgccaagcgcgtcaattaaccctcactaaagggaacaaaagctgttaattaagcgcgccacacgcaaacacaaatacacagcggccttgccaccatggtggatctacgcacgctcggctacagccagcagcaacaggagaagatcaaaccgaaggttcgttcgacagtggcgcagcaccacgaggcactggtcggccacgggtttacacacgcgcacatcgttgcgttaagccaacacccggcagcgttagggaccgtcgctgtcaagtatcaggacatgatcgcagcgttgccagaggcgacacacgaagcgatcgttggcgtcggcaaacagtggtccggcgcacgcgctctggaggccttgctcacggtggcgggagagttgagaggtccaccgttacagttggacacaggccaacttctcaagattgcaaaacgtggcggcgtgaccgcagtggaggcagtgcatgcatggcgcaatgcactgacgggtgccccgctcaacttgaccggagacgcccgggggatcaggtcacgtgcgtctcggagcattgttgcccagttatctcgccctgatccgggatccgacatcaccaaatctaaaatctctgaaaagatgaaaggccagggcccatccggaaataccaaatataacgaagagttcctgctgtacctggccggctttgtggacggtgacggtagcatcgttgctcagattaaaccacatcagtcttgtaagtttaaacatcagctacgtttgacctttaacgtgactcaaaagacccagcgccgttggtttctggacaaactagtggatgaaattggcgttggtcatgtatacgattctggtagcgtttcctactaccagttaagcgaaatcaagccgctgcacaacttcctgactcaactgcagccgtttctggaactgaaacagaaacaggcaaacctggttctgaaaattatcgaacagctgccgtctgcaaaagaatccccggacaaattcctggaagtttgtacctgggtggatcaggttgcagctctgaacgattctaagacgcgtaaaaccacttctgaaacctgtcgtgctgtgctggacagcctgagcgagaagaagaaatcctccccggcggccggtgattcctctgtttctaattccgagcacattgctcctctgtctctgccttcctctcctccatctgttggttctaacaaaaaattcctgctgtatcttgctggatttgtggattctgatggctccatcattgctcagataaaaccaaatcaatcttacaagttcaaacactacctctccttgaccttttgtgtcactcagaagacacaaagaaggtggttcttggacaaattggttgatcgtattggtgtgggctatgtccaggacagaggctctgtgtcagactaccgtctgtctgaaattaagcctcttcgtaactttctcacccaactgcaacccttcttgaagctcaaacagaagcaagcaaatctggttttgaaaatcatcgagcaactgccatctgccaaggagtcccctgacaagtttcttgaagtgtgtacttgggtggatcaggttgctgccttgaatgactccaagaccagaaaaaccacctctgagactgtgagggcagttctggatagcctctctgagaagaaaaagtcctctccttagtaactcgagcctgcagcagctgaagctttggacttctggcgcgcccaattcgccctatagtgagtcgtattacgtcgcgctcactggccgtcgttttacaacgtcgtgactgggaaaaccctggcgttacccaacttaatcgccttgcagcacatccccctttcgccagctggcgtaatagcgaagaggcccgcaccgaaacgcccttcccaacagttgcgcagcctgaatggcgaatgggagcgccctgtagcggcgcattaagcgcggcgggtgtggtggttacgcgcagcgtgaccgctacacttgccagcgccctagcgcccgctcctttcgctttcttcccttcctttctcgccacgttcgccggctttccccgtcaagctctaaatcgggggctccctttagggttccgatttagtgctttacggcacctcgaccccaaaaaacttgattagggtgatggttggcctgtagtgggccatagccctgatagacggtttttcgccctttgacgttggagtccacgttctttaatagtggactcttgttccaaactggaacaacactcaaccctatctcggtctattcttttgatttataagggattttgccgatttcggcctattggttaaaaaatgagctgatttaacaaaaatttaacgcgaattttaacaaaatattaacgcttacaatttaggtggcacttttcggggaaatgtgcgcggaacccctatttgtttatttttctaaatacattcaaatatgtatccgctcatgagacaataaccctgataaatgcttcaataatattgaaaaaggaagagtatgagtattcaacatttccgtgtcgcccttattcccttttttgcggcattttgccttcctgtttttgctcacccagaaacgctggtgaaagtaaaagatgctgaagatcagttgggtgcacgagtgggttacatcgaactggatctcaacagcggtaagatccttgagagttttcgccccgaagaacgttttccaatgatgagcacttttaaagttctgctatgtggcgcggtattatcccgtattgacgccgggcaagagcaactcggtcgccgcatacactattctcagaatgacttggttgagtactcaccagtcacagaaaagcatcttacggatggcatgacagtaagagaattatgcagtgctgccataaccatgagtgataacactgcggccaacttacttctgacaacgatcggaggaccgaaggagctaaccgcttttttgcacaacatgggggatcatgtaactcgccttgatcgttgggaaccggagctgaatgaagccataccaaacgacgagcgtgacaccacgatgcctgtagcaatggcaacaacgttgcgcaaactattaactggcgaactacttactctagcttcccggcaacaattaatagactggatggaggcggataaagttgcaggaccacttctgcgctcggcccttccggctggctggtttattgctgataaatctggagccggtgagcgtggttctcgcggtatcattgcagcactggggccagatggtaagccctcccgtatcgtagttatctacacgacggggagtcaggcaactatggatgaacgaaatagacagatcgctgagataggtgcctcactgattaagcattggtaactgtcagaccaagtttactcatatatactttagattgatttaaaacttcatttttaatttaaaaggatctaggtgaagatcctttttgataatctcatgaccaaaatcccttaacgtgagttttcgttccactgagcgtcagaccccgtagaaaagatcaaaggatcttcttgagatcctttttttctgcgcgtaatctgctgcttgcaaacaaaaaaaccaccgctaccagcggtggtttgtttgccggatcaagagctaccaactctttttccgaaggtaactggcttcagcagagcgcagataccaaatactgttcttctagtgtagccgtagttaggccaccacttcaagaactctgtagcaccgcctacatacctcgctctgctaatcctgttaccagtggctgctgccagtggcgataagtcgtgtcttaccgggttggactcaagacgatagttaccggataaggcgcagcggtcgggctgaacggggggttcgtgcacacagcccagcttggagcgaacgacctacaccgaactgagatacctacagcgtgagctatgagaaagcgccacgcttcccgaagggagaaaggcggacaggtatccggtaagcggcagggtcggaacaggagagcgcacgagggagcttccagggggaaacgcctggtatctttatagtcctgtcgggtttcgccacctctgacttgagcgtcgatttttgtgatgctcgtcaggggggcggagcctatggaaaaacgccagcaacgcggcctttttacggttcctggccttttgctggccttttgctcacat

SEQ ID NO: 296 - DNA, 4541 bp, Artificial sequence
  pCLS15790
ggtctttcctgcgttatcccctgattctgtggataaccgtattaccgcctttgagtgagctgataccgctcgccgcagccgaacgaccgagcgcagcgagtcagtgagcgaggaagcggagagcgcccaatacgcaaaccgcctctccccgcgcgttggccgattcattaatgcagctggcacgacaggtttcccgactggaaagcgggcagtgagcgcaacgcaattaatgtgagttagctcactcattaggcaccccaggctttacactttatgcttccggctcgtatgttgtgtggaattgtgagcggataacaatttcacacaggaaacagctatgaccatgattacgccaagcgcgtcaattaaccctcactaaagggaacaaaagctgttaattaagcgcgccacacgcaaacacaaatacacagcggccttgccaccatggtggatctacgcacgctcggctacagccagcagcaacaggagaagatcaaaccgaaggttcgttcgacagtggcgcagcaccacgaggcactggtcggccacgggtttacacacgcgcacatcgttgcgttaagccaacacccggcagcgttagggaccgtcgctgtcaagtatcaggacatgatcgcagcgttgccagaggcgacacacgaagcgatcgttggcgtcggcaaacagtggtccggcgcacgcgctctggaggccttgctcacggtggcgggagagttgagaggtccaccgttacagttggacacaggccaacttctcaagattgcaaaacgtggcggcgtgaccgcagtggaggcagtgcatgcatggcgcaatgcactgacgggtgccccgctcaacttgaccggagacgcccgggggatcaggtcacgtgcgtctcggagcattgttgcccagttatctcgccctgatccgggatccgacatcaccaaatctaaaatctctgaaaagatgaaaggccagggcccatccggaaataccaaatataacgaagagttcctgctgtacctggccggctttgtggacggtgacggtagcatcgttgctcagattaaaccacatcagtcttgtaagtttaaacatcagctacgtttgacctttaacgtgactcaaaagacccagcgccgttggtttctggacaaactagtggatgaaattggcgttggtcatgtatacgattctggtagcgtttcctactaccagttaagcgaaatcaagccgctgcacaacttcctgactcaactgcagccgtttctggaactgaaacagaaacaggcaaacctggttctgaaaattatcgaacagctgccgtctgcaaaagaatccccggacaaattcctggaagtttgtacctgggtggatcaggttgcagctctgaacgattctaagacgcgtaaaaccacttctgaaaccgttcgtgctgtgctggacagcctgagcgagaagaagaaatcctccccggcggccggtgattcctctgtttctaattccgagcacattgctcctctgtctctgccttcctctcctccatctgttggttctaacaaaaaattcctgctgtatcttgctggatttgtggattctgatggctccatcattgctcagataaaaccaaatcaatcttacaagttcaaacactacctctccttgaccttttgtgtcactcagaagacacaaagaaggtggttcttggacaaattggttgatcgtattggtgtgggctatgtccaggacagaggctctgtgtcagactaccgtctgtctgaaattaagcctcttcgtaactttctcacccaactgcaacccttcttgaagctcaaacagaagcaagcaaatctggttttgaaaatcatcgagcaactgccatctgccaaggagtcccctgacaagtttcttgaagtgtgtacttgggtggatcaggttgctgccttgaatgactccaagaccagaaaaaccacctctgagacttgtagggcagttctggatagcctctctgagaagaaaaagtcctctccttagtaactcgagcctgcagcagctgaagctttggacttctggcgcgcccaattcgccctatagtgagtcgtattacgtcgcgctcactggccgtcgttttacaacgtcgtgactgggaaaaccctggcgttacccaacttaatcgccttgcagcacatccccctttcgccagctggcgtaatagcgaagaggcccgcaccgaaacgcccttcccaacagttgcgcagcctgaatggcgaatgggagcgccctgtagcggcgcattaagcgcggcgggtgtggtggttacgcgcagcgtgaccgctacacttgccagcgccctagcgcccgctcctttcgctttcttcccttcctttctcgccacgttcgccggctttccccgtcaagctctaaatcgggggctccctttagggttccgatttagtgctttacggcacctcgaccccaaaaaacttgattagggtgatggttggcctgtagtgggccatagccctgatagacggtttttcgccctttgacgttggagtccacgttctttaatagtggactcttgttccaaactggaacaacactcaaccctatctcggtctattcttttgatttataagggattttgccgatttcggcctattggttaaaaaatgagctgatttaacaaaaatttaacgcgaattttaacaaaatattaacgcttacaatttaggtggcacttttcggggaaatgtgcgcggaacccctatttgtttatttttctaaatacattcaaatatgtatccgctcatgagacaataaccctgataaatgcttcaataatattgaaaaaggaagagtatgagtattcaacatttccgtgtcgcccttattcccttttttgcggcattttgccttcctgtttttgctcacccagaaacgctggtgaaagtaaaagatgctgaagatcagttgggtgcacgagtgggttacatcgaactggatctcaacagcggtaagatccttgagagttttcgccccgaagaacgttttccaatgatgagcacttttaaagttctgctatgtggcgcggtattatcccgtattgacgccgggcaagagcaactcggtcgccgcatacactattctcagaatgacttggttgagtactcaccagtcacagaaaagcatcttacggatggcatgacagtaagagaattatgcagtgctgccataaccatgagtgataacactgcggccaacttacttctgacaacgatcggaggaccgaaggagctaaccgcttttttgcacaacatgggggatcatgtaactcgccttgatcgttgggaaccggagctgaatgaagccataccaaacgacgagcgtgacaccacgatgcctgtagcaatggcaacaacgttgcgcaaactattaactggcgaactacttactctagcttcccggcaacaattaatagactggatggaggcggataaagttgcaggaccacttctgcgctcggcccttccggctggctggtttattgctgataaatctggagccggtgagcgtggttctcgcggtatcattgcagcactggggccagatggtaagccctcccgtatcgtagttatctacacgacggggagtcaggcaactatggatgaacgaaatagacagatcgctgagataggtgcctcactgattaagcattggtaactgtcagaccaagtttactcatatatactttagattgatttaaaacttcatttttaatttaaaaggatctaggtgaagatcctttttgataatctcatgaccaaaatcccttaacgtgagttttcgttccactgagcgtcagaccccgtagaaaagatcaaaggatcttcttgagatcctttttttctgcgcgtaatctgctgcttgcaaacaaaaaaaccaccgctaccagcggtggtttgtttgccggatcaagagctaccaactctttttccgaaggtaactggcttcagcagagcgcagataccaaatactgttcttctagtgtagccgtagttaggccaccacttcaagaactctgtagcaccgcctacatacctcgctctgctaatcctgttaccagtggctgctgccagtggcgataagtcgtgtcttaccgggttggactcaagacgatagttaccggataaggcgcagcggtcgggctgaacggggggttcgtgcacacagcccagcttggagcgaacgacctacaccgaactgagatacctacagcgtgagctatgagaaagcgccacgcttcccgaagggagaaaggcggacaggtatccggtaagcggcagggtcggaacaggagagcgcacgagggagcttccagggggaaacgcctggtatctttatagtcctgtcgggtttcgccacctctgacttgagcgtcgatttttgtgatgctcgtcaggggggcggagcctatggaaaaacgccagcaacgcggcctttttacggttcctggccttttgctggccttttgctcacat

SEQ ID NO: 297 - DNA, 1410 bp, Artificial sequence
  TCRB02A1 RVD
gcagcctcaacttgaccccccagcaggtggtggccatcgccagcaataatggtggcaagcaggcgctggagacggtccagcggctgttgccggtgctgtgccaggcccacggcttgaccccggagcaggtggtggccatcgccagccacgatggcggcaagcaggcgctggagacggtccagcggctgttgccggtgctgtgccaggcccacggcttgaccccccagcaggtggtggccatcgccagcaatggcggtggcaagcaggcgctggagacggtccagcggctgttgccggtgctgtgccaggcccacggcttgaccccccagcaggtggtggccatcgccagcaataatggtggcaagcaggcgctggagacggtccagcggctgttgccggtgctgtgccaggcccacggcttgaccccccagcaggtggtggccatcgccagcaataatggtggcaagcaggcgctggagacggtccagcggctgttgccggtgctgtgccaggcccacggcttgaccccccagcaggtggtggccatcgccagcaatggcggtggcaagcaggcgctggagacggtccagcggctgttgccggtgctgtgccaggcccacggcttgaccccggagcaggtggtggccatcgccagccacgatggcggcaagcaggcgctggagacggtccagcggctgttgccggtgctgtgccaggcccacggcttgaccccggagcaggtggtggccatcgccagcaatattggtggcaagcaggcgctggagacggtgcaggcgctgttgccggtgctgtgccaggcccacggcttgaccccccagcaggtggtggccatcgccagcaataatggtggcaagcaggcgctggagacggtccagcggctgttgccggtgctgtgccaggcccacggcttgaccccggagcaggtggtggccatcgccagccacgatggcggcaagcaggcgctggagacggtccagcggctgttgccggtgctgtgccaggcccacggcttgaccccccagcaggtggtggccatcgccagcaataatggtggcaagcaggcgctggagacggtccagcggctgttgccggtgctgtgccaggcccacggcttgaccccggagcaggtggtggccatcgccagccacgatggcggcaagcaggcgctggagacggtccagcggctgttgccggtgctgtgccaggcccacggcttgaccccggagcaggtggtggccatcgccagccacgatggcggcaagcaggcgctggagacggtccagcggctgttgccggtgctgtgccaggcccacggcttgacccctcagcaggtggtggccatcgccagcaatggcggcggcaggccggcgctggagagcattgtgatgc

SEQ ID NO: 298 - DNA, 1410 bp, Artificial sequence
  TCRB02A2 RVD
gcagcctcaacttgaccccccagcaggtggtggccatcgccagcaataatggtggcaagcaggcgctggagacggtccagcggctgttgccggtgctgtgccaggcccacggcttgaccccggagcaggtggtggccatcgccagccacgatggcggcaagcaggcgctggagacggtccagcggctgttgccggtgctgtgccaggcccacggcttgaccccccagcaggtggtggccatcgccagcaatggcggtggcaagcaggcgctggagacggtccagcggctgttgccggtgctgtgccaggcccacggcttgaccccccagcaggtggtggccatcgccagcaataatggtggcaagcaggcgctggagacggtccagcggctgttgccggtgctgtgccaggcccacggcttgaccccccagcaggtggtggccatcgccagcaatggcggtggcaagcaggcgctggagacggtccagcggctgttgccggtgctgtgccaggcccacggcttgaccccccagcaggtggtggccatcgccagcaataatggtggcaagcaggcgctggagacggtccagcggctgttgccggtgctgtgccaggcccacggcttgaccccggagcaggtggtggccatcgccagccacgatggcggcaagcaggcgctggagacggtccagcggctgttgccggtgctgtgccaggcccacggcttgaccccccagcaggtggtggccatcgccagcaatggcggtggcaagcaggcgctggagacggtccagcggctgttgccggtgctgtgccaggcccacggcttgaccccccagcaggtggtggccatcgccagcaataatggtggcaagcaggcgctggagacggtccagcggctgttgccggtgctgtgccaggcccacggcttgaccccccagcaggtggtggccatcgccagcaataatggtggcaagcaggcgctggagacggtccagcggctgttgccggtgctgtgccaggcccacggcttgaccccccagcaggtggtggccatcgccagcaatggcggtggcaagcaggcgctggagacggtccagcggctgttgccggtgctgtgccaggcccacggcttgaccccggagcaggtggtggccatcgccagccacgatggcggcaagcaggcgctggagacggtccagcggctgttgccggtgctgtgccaggcccacggcttgaccccggagcaggtggtggccatcgccagcaatattggtggcaagcaggcgctggagacggtgcaggcgctgttgccggtgctgtgccaggcccacggcttgacccctcagcaggtggtggccatcgccagcaatggcggcggcaggccggcgctggagagcattgtgatgc

SEQ ID NO: 299 - DNA, 1410 bp, Artificial sequence
  TCRB02A3  RVD
gcagcctcaacttgaccccccagcaggtggtggccatcgccagcaataatggtggcaagcaggcgctggagacggtccagcggctgttgccggtgctgtgccaggcccacggcttgaccccccagcaggtggtggccatcgccagcaatggcggtggcaagcaggcgctggagacggtccagcggctgttgccggtgctgtgccaggcccacggcttgaccccggagcaggtggtggccatcgccagcaatattggtggcaagcaggcgctggagacggtgcaggcgctgttgccggtgctgtgccaggcccacggcttgaccccccagcaggtggtggccatcgccagcaatggcggtggcaagcaggcgctggagacggtccagcggctgttgccggtgctgtgccaggcccacggcttgaccccccagcaggtggtggccatcgccagcaataatggtggcaagcaggcgctggagacggtccagcggctgttgccggtgctgtgccaggcccacggcttgaccccggagcaggtggtggccatcgccagccacgatggcggcaagcaggcgctggagacggtccagcggctgttgccggtgctgtgccaggcccacggcttgaccccccagcaggtggtggccatcgccagcaatggcggtggcaagcaggcgctggagacggtccagcggctgttgccggtgctgtgccaggcccacggcttgaccccccagcaggtggtggccatcgccagcaataatggtggcaagcaggcgctggagacggtccagcggctgttgccggtgctgtgccaggcccacggcttgaccccccagcaggtggtggccatcgccagcaatggcggtggcaagcaggcgctggagacggtccagcggctgttgccggtgctgtgccaggcccacggcttgaccccccagcaggtggtggccatcgccagcaataatggtggcaagcaggcgctggagacggtccagcggctgttgccggtgctgtgccaggcccacggcttgaccccggagcaggtggtggccatcgccagccacgatggcggcaagcaggcgctggagacggtccagcggctgttgccggtgctgtgccaggcccacggcttgaccccccagcaggtggtggccatcgccagcaatggcggtggcaagcaggcgctggagacggtccagcggctgttgccggtgctgtgccaggcccacggcttgaccccccagcaggtggtggccatcgccagcaataatggtggcaagcaggcgctggagacggtccagcggctgttgccggtgctgtgccaggcccacggcttgacccctcagcaggtggtggccatcgccagcaatggcggcggcaggccggcgctggagagcattgtgatgc

SEQ ID NO: 300 - DNA, 5885 bp, Artificial sequence
  pCLS15791
ggtctttcctgcgttatcccctgattctgtggataaccgtattaccgcctttgagtgagctgataccgctcgccgcagccgaacgaccgagcgcagcgagtcagtgagcgaggaagcggagagcgcccaatacgcaaaccgcctctccccgcgcgttggccgattcattaatgcagctggcacgacaggtttcccgactggaaagcgggcagtgagcgcaacgcaattaatgtgagttagctcactcattaggcaccccaggctttacactttatgcttccggctcgtatgttgtgtggaattgtgagcggataacaatttcacacaggaaacagctatgaccatgattacgccaagcgcgtcaattaaccctcactaaagggaacaaaagctgttaattaagcgcgccacacgcaaacacaaatacacagcggccttgccaccatggtggatctacgcacgctcggctacagccagcagcaacaggagaagatcaaaccgaaggttcgttcgacagtggcgcagcaccacgaggcactggtcggccacgggtttacacacgcgcacatcgttgcgttaagccaacacccggcagcgttagggaccgtcgctgtcaagtatcaggacatgatcgcagcgttgccagaggcgacacacgaagcgatcgttggcgtcggcaaacagtggtccggcgcacgcgctctggaggccttgctcacggtggcgggagagttgagaggtccaccgttacagttggacacaggccaacttctcaagattgcaaaacgtggcggcgtgaccgcagtggaggcagtgcatgcatggcgcaatgcactgacgggtgccccgctcaacttgaccccccagcaggtggtggccatcgccagcaataatggtggcaagcaggcgctggagacggtccagcggctgttgccggtgctgtgccaggcccacggcttgaccccggagcaggtggtggccatcgccagccacgatggcggcaagcaggcgctggagacggtccagcggctgttgccggtgctgtgccaggcccacggcttgaccccccagcaggtggtggccatcgccagcaatggcggtggcaagcaggcgctggagacggtccagcggctgttgccggtgctgtgccaggcccacggcttgaccccccagcaggtggtggccatcgccagcaataatggtggcaagcaggcgctggagacggtccagcggctgttgccggtgctgtgccaggcccacggcttgaccccccagcaggtggtggccatcgccagcaataatggtggcaagcaggcgctggagacggtccagcggctgttgccggtgctgtgccaggcccacggcttgaccccccagcaggtggtggccatcgccagcaatggcggtggcaagcaggcgctggagacggtccagcggctgttgccggtgctgtgccaggcccacggcttgaccccggagcaggtggtggccatcgccagccacgatggcggcaagcaggcgctggagacggtccagcggctgttgccggtgctgtgccaggcccacggcttgaccccggagcaggtggtggccatcgccagcaatattggtggcaagcaggcgctggagacggtgcaggcgctgttgccggtgctgtgccaggcccacggcttgaccccccagcaggtggtggccatcgccagcaataatggtggcaagcaggcgctggagacggtccagcggctgttgccggtgctgtgccaggcccacggcttgaccccggagcaggtggtggccatcgccagccacgatggcggcaagcaggcgctggagacggtccagcggctgttgccggtgctgtgccaggcccacggcttgaccccccagcaggtggtggccatcgccagcaataatggtggcaagcaggcgctggagacggtccagcggctgttgccggtgctgtgccaggcccacggcttgaccccggagcaggtggtggccatcgccagccacgatggcggcaagcaggcgctggagacggtccagcggctgttgccggtgctgtgccaggcccacggcttgaccccggagcaggtggtggccatcgccagccacgatggcggcaagcaggcgctggagacggtccagcggctgttgccggtgctgtgccaggcccacggcttgacccctcagcaggtggtggccatcgccagcaatggcggcggcaggccggcgctggagagcattgttgcccagttatctcgccctgatccgggatccgacatcaccaaatctaaaatctctgaaaagatgaaaggccagggcccatccggaaataccaaatataacgaagagttcctgctgtacctggccggctttgtggacggtgacggtagcatcgttgctcagattaaaccacatcagtcttgtaagtttaaacatcagctacgtttgacctttaacgtgactcaaaagacccagcgccgttggtttctggacaaactagtggatgaaattggcgttggtcatgtatacgattctggtagcgtttcctactaccagttaagcgaaatcaagccgctgcacaacttcctgactcaactgcagccgtttctggaactgaaacagaaacaggcaaacctggttctgaaaattatcgaacagctgccgtctgcaaaagaatccccggacaaattcctggaagtttgtacctgggtggatcaggttgcagctctgaacgattctaagacgcgtaaaaccacttctgaaaccgttcgtgctgtgctggacagcctgagcgagaagaagaaatcctccccggcggccggtgattcctctgtttctaattccgagcacattgctcctctgtctctgccttcctctcctccatctgttggttctaacaaaaaattcctgctgtatcttgctggatttgtggattctgatggctccatcattgctcagataaaaccaaatcaatcttacaagttcaaacactacctctccttgaccttttgtgtcactcagaagacacaaagaaggtggttcttggacaaattggttgatcgtattggtgtgggctatgtccaggacagaggctctgtgtcagactaccgtctgtctgaaattaagcctcttcgtaactttctcacccaactgcaacccttcttgaagctcaaacagaagcaagcaaatctggttttgaaaatcatcgagcaactgccatctgccaaggagtcccctgacaagtttcttgaagtgtgtacttgggtggatcaggttgctgccttgaatgactccaagaccagaaaaaccacctctgagactgtgagggcagttctggatagcctctctgagaagaaaaagtcctctccttagtaactcgagcctgcagcagctgaagctttggacttctggcgcgcccaattcgccctatagtgagtcgtattacgtcgcgctcactggccgtcgttttacaacgtcgtgactgggaaaaccctggcgttacccaacttaatcgccttgcagcacatccccctttcgccagctggcgtaatagcgaagaggcccgcaccgaaacgcccttcccaacagttgcgcagcctgaatggcgaatgggagcgccctgtagcggcgcattaagcgcggcgggtgtggtggttacgcgcagcgtgaccgctacacttgccagcgccctagcgcccgctcctttcgctttcttcccttcctttctcgccacgttcgccggctttccccgtcaagctctaaatcgggggctccctttagggttccgatttagtgctttacggcacctcgaccccaaaaaacttgattagggtgatggttggcctgtagtgggccatagccctgatagacggtttttcgccctttgacgttggagtccacgttctttaatagtggactcttgttccaaactggaacaacactcaaccctatctcggtctattcttttgatttataagggattttgccgatttcggcctattggttaaaaaatgagctgatttaacaaaaatttaacgcgaattttaacaaaatattaacgcttacaatttaggtggcacttttcggggaaatgtgcgcggaacccctatttgtttatttttctaaatacattcaaatatgtatccgctcatgagacaataaccctgataaatgcttcaataatattgaaaaaggaagagtatgagtattcaacatttccgtgtcgcccttattcccttttttgcggcattttgccttcctgtttttgctcacccagaaacgctggtgaaagtaaaagatgctgaagatcagttgggtgcacgagtgggttacatcgaactggatctcaacagcggtaagatccttgagagttttcgccccgaagaacgttttccaatgatgagcacttttaaagttctgctatgtggcgcggtattatcccgtattgacgccgggcaagagcaactcggtcgccgcatacactattctcagaatgacttggttgagtactcaccagtcacagaaaagcatcttacggatggcatgacagtaagagaattatgcagtgctgccataaccatgagtgataacactgcggccaacttacttctgacaacgatcggaggaccgaaggagctaaccgcttttttgcacaacatgggggatcatgtaactcgccttgatcgttgggaaccggagctgaatgaagccataccaaacgacgagcgtgacaccacgatgcctgtagcaatggcaacaacgttgcgcaaactattaactggcgaactacttactctagcttcccggcaacaattaatagactggatggaggcggataaagttgcaggaccacttctgcgctcggcccttccggctggctggtttattgctgataaatctggagccggtgagcgtggttctcgcggtatcattgcagcactggggccagatggtaagccctcccgtatcgtagttatctacacgacggggagtcaggcaactatggatgaacgaaatagacagatcgctgagataggtgcctcactgattaagcattggtaactgtcagaccaagtttactcatatatactttagattgatttaaaacttcatttttaatttaaaaggatctaggtgaagatcctttttgataatctcatgaccaaaatcccttaacgtgagttttcgttccactgagcgtcagaccccgtagaaaagatcaaaggatcttcttgagatcctttttttctgcgcgtaatctgctgcttgcaaacaaaaaaaccaccgctaccagcggtggtttgtttgccggatcaagagctaccaactctttttccgaaggtaactggcttcagcagagcgcagataccaaatactgttcttctagtgtagccgtagttaggccaccacttcaagaactctgtagcaccgcctacatacctcgctctgctaatcctgttaccagtggctgctgccagtggcgataagtcgtgtcttaccgggttggactcaagacgatagttaccggataaggcgcagcggtcgggctgaacggggggttcgtgcacacagcccagcttggagcgaacgacctacaccgaactgagatacctacagcgtgagctatgagaaagcgccacgcttcccgaagggagaaaggcggacaggtatccggtaagcggcagggtcggaacaggagagcgcacgagggagcttccagggggaaacgcctggtatctttatagtcctgtcgggtttcgccacctctgacttgagcgtcgatttttgtgatgctcgtcaggggggcggagcctatggaaaaacgccagcaacgcggcctttttacggttcctggccttttgctggccttttgctcacat

SEQ ID NO: 301 - DNA, 5885 bp, Artificial sequence
  pCLS15792
ggtctttcctgcgttatcccctgattctgtggataaccgtattaccgcctttgagtgagctgataccgctcgccgcagccgaacgaccgagcgcagcgagtcagtgagcgaggaagcggagagcgcccaatacgcaaaccgcctctccccgcgcgttggccgattcattaatgcagctggcacgacaggtttcccgactggaaagcgggcagtgagcgcaacgcaattaatgtgagttagctcactcattaggcaccccaggctttacactttatgcttccggctcgtatgttgtgtggaattgtgagcggataacaatttcacacaggaaacagctatgaccatgattacgccaagcgcgtcaattaaccctcactaaagggaacaaaagctgttaattaagcgcgccacacgcaaacacaaatacacagcggccttgccaccatggtggatctacgcacgctcggctacagccagcagcaacaggagaagatcaaaccgaaggttcgttcgacagtggcgcagcaccacgaggcactggtcggccacgggtttacacacgcgcacatcgttgcgttaagccaacacccggcagcgttagggaccgtcgctgtcaagtatcaggacatgatcgcagcgttgccagaggcgacacacgaagcgatcgttggcgtcggcaaacagtggtccggcgcacgcgctctggaggccttgctcacggtggcgggagagttgagaggtccaccgttacagttggacacaggccaacttctcaagattgcaaaacgtggcggcgtgaccgcagtggaggcagtgcatgcatggcgcaatgcactgacgggtgccccgctcaacttgaccccccagcaggtggtggccatcgccagcaataatggtggcaagcaggcgctggagacggtccagcggctgttgccggtgctgtgccaggcccacggcttgaccccggagcaggtggtggccatcgccagccacgatggcggcaagcaggcgctggagacggtccagcggctgttgccggtgctgtgccaggcccacggcttgaccccccagcaggtggtggccatcgccagcaatggcggtggcaagcaggcgctggagacggtccagcggctgttgccggtgctgtgccaggcccacggcttgaccccccagcaggtggtggccatcgccagcaataatggtggcaagcaggcgctggagacggtccagcggctgttgccggtgctgtgccaggcccacggcttgaccccccagcaggtggtggccatcgccagcaatggcggtggcaagcaggcgctggagacggtccagcggctgttgccggtgctgtgccaggcccacggcttgaccccccagcaggtggtggccatcgccagcaataatggtggcaagcaggcgctggagacggtccagcggctgttgccggtgctgtgccaggcccacggcttgaccccggagcaggtggtggccatcgccagccacgatggcggcaagcaggcgctggagacggtccagcggctgttgccggtgctgtgccaggcccacggcttgaccccccagcaggtggtggccatcgccagcaatggcggtggcaagcaggcgctggagacggtccagcggctgttgccggtgctgtgccaggcccacggcttgaccccccagcaggtggtggccatcgccagcaataatggtggcaagcaggcgctggagacggtccagcggctgttgccggtgctgtgccaggcccacggcttgaccccccagcaggtggtggccatcgccagcaataatggtggcaagcaggcgctggagacggtccagcggctgttgccggtgctgtgccaggcccacggcttgaccccccagcaggtggtggccatcgccagcaatggcggtggcaagcaggcgctggagacggtccagcggctgttgccggtgctgtgccaggcccacggcttgaccccggagcaggtggtggccatcgccagccacgatggcggcaagcaggcgctggagacggtccagcggctgttgccggtgctgtgccaggcccacggcttgaccccggagcaggtggtggccatcgccagcaatattggtggcaagcaggcgctggagacggtgcaggcgctgttgccggtgctgtgccaggcccacggcttgacccctcagcaggtggtggccatcgccagcaatggcggcggcaggccggcgctggagagcattgttgcccagttatctcgccctgatccgggatccgacatcaccaaatctaaaatctctgaaaagatgaaaggccagggcccatccggaaataccaaatataacgaagagttcctgctgtacctggccggctttgtggacggtgacggtagcatcgttgctcagattaaaccacatcagtcttgtaagtttaaacatcagctacgtttgacctttaacgtgactcaaaagacccagcgccgttggtttctggacaaactagtggatgaaattggcgttggtcatgtatacgattctggtagcgtttcctactaccagttaagcgaaatcaagccgctgcacaacttcctgactcaactgcagccgtttctggaactgaaacagaaacaggcaaacctggttctgaaaattatcgaacagctgccgtctgcaaaagaatccccggacaaattcctggaagtttgtacctgggtggatcaggttgcagctctgaacgattctaagacgcgtaaaaccacttctgaaaccgttcgtgctgtgctggacagcctgagcgagaagaagaaatcctccccggcggccggtgattcctctgtttctaattccgagcacattgctcctctgtctctgccttcctctcctccatctgttggttctaacaaaaaattcctgctgtatcttgctggatttgtggattctgatggctccatcattgctcagataaaaccaaatcaatcttacaagttcaaacactacctctccttgaccttttgtgtcactcagaagacacaaagaaggtggttcttggacaaattggttgatcgtattggtgtgggctatgtccaggacagaggctctgtgtcagactaccgtctgtctgaaattaagcctcttcgtaactttctcacccaactgcaacccttcttgaagctcaaacagaagcaagcaaatctggttttgaaaatcatcgagcaactgccatctgccaaggagtcccctgacaagtttcttgaagtgtgtacttgggtggatcaggttgctgccttgaatgactccaagaccagaaaaaccacctctgagactgtgagggcagttctggatagcctctctgagaagaaaaagtcctctccttagtaactcgagcctgcagcagctgaagctttggacttctggcgcgcccaattcgccctatagtgagtcgtattacgtcgcgctcactggccgtcgttttacaacgtcgtgactgggaaaaccctggcgttacccaacttaatcgccttgcagcacatccccctttcgccagctggcgtaatagcgaagaggcccgcaccgaaacgcccttcccaacagttgcgcagcctgaatggcgaatgggagcgccctgtagcggcgcattaagcgcggcgggtgtggtggttacgcgcagcgtgaccgctacacttgccagcgccctagcgcccgctcctttcgctttcttcccttcctttctcgccacgttcgccggctttccccgtcaagctctaaatcgggggctccctttagggttccgatttagtgctttacggcacctcgaccccaaaaaacttgattagggtgatggttggcctgtagtgggccatagccctgatagacggtttttcgccctttgacgttggagtccacgttctttaatagtggactcttgttccaaactggaacaacactcaaccctatctcggtctattcttttgatttataagggattttgccgatttcggcctattggttaaaaaatgagctgatttaacaaaaatttaacgcgaattttaacaaaatattaacgcttacaatttaggtggcacttttcggggaaatgtgcgcggaacccctatttgtttatttttctaaatacattcaaatatgtatccgctcatgagacaataaccctgataaatgcttcaataatattgaaaaaggaagagtatgagtattcaacatttccgtgtcgcccttattcccttttttgcggcattttgccttcctgtttttgctcacccagaaacgctggtgaaagtaaaagatgctgaagatcagttgggtgcacgagtgggttacatcgaactggatctcaacagcggtaagatccttgagagttttcgccccgaagaacgttttccaatgatgagcacttttaaagttctgctatgtggcgcggtattatcccgtattgacgccgggcaagagcaactcggtcgccgcatacactattctcagaatgacttggttgagtactcaccagtcacagaaaagcatcttacggatggcatgacagtaagagaattatgcagtgctgccataaccatgagtgataacactgcggccaacttacttctgacaacgatcggaggaccgaaggagctaaccgcttttttgcacaacatgggggatcatgtaactcgccttgatcgttgggaaccggagctgaatgaagccataccaaacgacgagcgtgacaccacgatgcctgtagcaatggcaacaacgttgcgcaaactattaactggcgaactacttactctagcttcccggcaacaattaatagactggatggaggcggataaagttgcaggaccacttctgcgctcggcccttccggctggctggtttattgctgataaatctggagccggtgagcgtggttctcgcggtatcattgcagcactggggccagatggtaagccctcccgtatcgtagttatctacacgacggggagtcaggcaactatggatgaacgaaatagacagatcgctgagataggtgcctcactgattaagcattggtaactgtcagaccaagtttactcatatatactttagattgatttaaaacttcatttttaatttaaaaggatctaggtgaagatcctttttgataatctcatgaccaaaatcccttaacgtgagttttcgttccactgagcgtcagaccccgtagaaaagatcaaaggatcttcttgagatcctttttttctgcgcgtaatctgctgcttgcaaacaaaaaaaccaccgctaccagcggtggtttgtttgccggatcaagagctaccaactctttttccgaaggtaactggcttcagcagagcgcagataccaaatactgttcttctagtgtagccgtagttaggccaccacttcaagaactctgtagcaccgcctacatacctcgctctgctaatcctgttaccagtggctgctgccagtggcgataagtcgtgtcttaccgggttggactcaagacgatagttaccggataaggcgcagcggtcgggctgaacggggggttcgtgcacacagcccagcttggagcgaacgacctacaccgaactgagatacctacagcgtgagctatgagaaagcgccacgcttcccgaagggagaaaggcggacaggtatccggtaagcggcagggtcggaacaggagagcgcacgagggagcttccagggggaaacgcctggtatctttatagtcctgtcgggtttcgccacctctgacttgagcgtcgatttttgtgatgctcgtcaggggggcggagcctatggaaaaacgccagcaacgcggcctttttacggttcctggccttttgctggccttttgctcacat

SEQ ID NO: 302 - DNA, 5885 bp, Artificial sequence
  pCLS15793
ggtctttcctgcgttatcccctgattctgtggataaccgtattaccgcctttgagtgagctgataccgctcgccgcagccgaacgaccgagcgcagcgagtcagtgagcgaggaagcggagagcgcccaatacgcaaaccgcctctccccgcgcgttggccgattcattaatgcagctggcacgacaggtttcccgactggaaagcgggcagtgagcgcaacgcaattaatgtgagttagctcactcattaggcaccccaggctttacactttatgcttccggctcgtatgttgtgtggaattgtgagcggataacaatttcacacaggaaacagctatgaccatgattacgccaagcgcgtcaattaaccctcactaaagggaacaaaagctgttaattaagcgcgccacacgcaaacacaaatacacagcggccttgccaccatggtggatctacgcacgctcggctacagccagcagcaacaggagaagatcaaaccgaaggttcgttcgacagtggcgcagcaccacgaggcactggtcggccacgggtttacacacgcgcacatcgttgcgttaagccaacacccggcagcgttagggaccgtcgctgtcaagtatcaggacatgatcgcagcgttgccagaggcgacacacgaagcgatcgttggcgtcggcaaacagtggtccggcgcacgcgctctggaggccttgctcacggtggcgggagagttgagaggtccaccgttacagttggacacaggccaacttctcaagattgcaaaacgtggcggcgtgaccgcagtggaggcagtgcatgcatggcgcaatgcactgacgggtgccccgctcaacttgaccccccagcaggtggtggccatcgccagcaataatggtggcaagcaggcgctggagacggtccagcggctgttgccggtgctgtgccaggcccacggcttgaccccccagcaggtggtggccatcgccagcaatggcggtggcaagcaggcgctggagacggtccagcggctgttgccggtgctgtgccaggcccacggcttgaccccggagcaggtggtggccatcgccagcaatattggtggcaagcaggcgctggagacggtgcaggcgctgttgccggtgctgtgccaggcccacggcttgaccccccagcaggtggtggccatcgccagcaatggcggtggcaagcaggcgctggagacggtccagcggctgttgccggtgctgtgccaggcccacggcttgaccccccagcaggtggtggccatcgccagcaataatggtggcaagcaggcgctggagacggtccagcggctgttgccggtgctgtgccaggcccacggcttgaccccggagcaggtggtggccatcgccagccacgatggcggcaagcaggcgctggagacggtccagcggctgttgccggtgctgtgccaggcccacggcttgaccccccagcaggtggtggccatcgccagcaatggcggtggcaagcaggcgctggagacggtccagcggctgttgccggtgctgtgccaggcccacggcttgaccccccagcaggtggtggccatcgccagcaataatggtggcaagcaggcgctggagacggtccagcggctgttgccggtgctgtgccaggcccacggcttgaccccccagcaggtggtggccatcgccagcaatggcggtggcaagcaggcgctggagacggtccagcggctgttgccggtgctgtgccaggcccacggcttgaccccccagcaggtggtggccatcgccagcaataatggtggcaagcaggcgctggagacggtccagcggctgttgccggtgctgtgccaggcccacggcttgaccccggagcaggtggtggccatcgccagccacgatggcggcaagcaggcgctggagacggtccagcggctgttgccggtgctgtgccaggcccacggcttgaccccccagcaggtggtggccatcgccagcaatggcggtggcaagcaggcgctggagacggtccagcggctgttgccggtgctgtgccaggcccacggcttgaccccccagcaggtggtggccatcgccagcaataatggtggcaagcaggcgctggagacggtccagcggctgttgccggtgctgtgccaggcccacggcttgacccctcagcaggtggtggccatcgccagcaatggcggcggcaggccggcgctggagagcattgttgcccagttatctcgccctgatccgggatccgacatcaccaaatctaaaatctctgaaaagatgaaaggccagggcccatccggaaataccaaatataacgaagagttcctgctgtacctggccggctttgtggacggtgacggtagcatcgttgctcagattaaaccacatcagtcttgtaagtttaaacatcagctacgtttgacctttaacgtgactcaaaagacccagcgccgttggtttctggacaaactagtggatgaaattggcgttggtcatgtatacgattctggtagcgtttcctactaccagttaagcgaaatcaagccgctgcacaacttcctgactcaactgcagccgtttctggaactgaaacagaaacaggcaaacctggttctgaaaattatcgaacagctgccgtctgcaaaagaatccccggacaaattcctggaagtttgtacctgggtggatcaggttgcagctctgaacgattctaagacgcgtaaaaccacttctgaaaccgttcgtgctgtgctggacagcctgagcgagaagaagaaatcctccccggcggccggtgattcctctgtttctaattccgagcacattgctcctctgtctctgccttcctctcctccatctgttggttctaacaaaaaattcctgctgtatcttgctggatttgtggattctgatggctccatcattgctcagataaaaccaaatcaatcttacaagttcaaacactacctctccttgaccttttgtgtcactcagaagacacaaagaaggtggttcttggacaaattggttgatcgtattggtgtgggctatgtccaggacagaggctctgtgtcagactaccgtctgtctgaaattaagcctcttcgtaactttctcacccaactgcaacccttcttgaagctcaaacagaagcaagcaaatctggttttgaaaatcatcgagcaactgccatctgccaaggagtcccctgacaagtttcttgaagtgtgtacttgggtggatcaggttgctgccttgaatgactccaagaccagaaaaaccacctctgagactgtgagggcagttctggatagcctctctgagaagaaaaagtcctctccttagtaactcgagcctgcagcagctgaagctttggacttctggcgcgcccaattcgccctatagtgagtcgtattacgtcgcgctcactggccgtcgttttacaacgtcgtgactgggaaaaccctggcgttacccaacttaatcgccttgcagcacatccccctttcgccagctggcgtaatagcgaagaggcccgcaccgaaacgcccttcccaacagttgcgcagcctgaatggcgaatgggagcgccctgtagcggcgcattaagcgcggcgggtgtggtggttacgcgcagcgtgaccgctacacttgccagcgccctagcgcccgctcctttcgctttcttcccttcctttctcgccacgttcgccggctttccccgtcaagctctaaatcgggggctccctttagggttccgatttagtgctttacggcacctcgaccccaaaaaacttgattagggtgatggttggcctgtagtgggccatagccctgatagacggtttttcgccctttgacgttggagtccacgttctttaatagtggactcttgttccaaactggaacaacactcaaccctatctcggtctattcttttgatttataagggattttgccgatttcggcctattggttaaaaaatgagctgatttaacaaaaatttaacgcgaattttaacaaaatattaacgcttacaatttaggtggcacttttcggggaaatgtgcgcggaacccctatttgtttatttttctaaatacattcaaatatgtatccgctcatgagacaataaccctgataaatgcttcaataatattgaaaaaggaagagtatgagtattcaacatttccgtgtcgcccttattcccttttttgcggcattttgccttcctgtttttgctcacccagaaacgctggtgaaagtaaaagatgctgaagatcagttgggtgcacgagtgggttacatcgaactggatctcaacagcggtaagatccttgagagttttcgccccgaagaacgttttccaatgatgagcacttttaaagttctgctatgtggcgcggtattatcccgtattgacgccgggcaagagcaactcggtcgccgcatacactattctcagaatgacttggttgagtactcaccagtcacagaaaagcatcttacggatggcatgacagtaagagaattatgcagtgctgccataaccatgagtgataacactgcggccaacttacttctgacaacgatcggaggaccgaaggagctaaccgcttttttgcacaacatgggggatcatgtaactcgccttgatcgttgggaaccggagctgaatgaagccataccaaacgacgagcgtgacaccacgatgcctgtagcaatggcaacaacgttgcgcaaactattaactggcgaactacttactctagcttcccggcaacaattaatagactggatggaggcggataaagttgcaggaccacttctgcgctcggcccttccggctggctggtttattgctgataaatctggagccggtgagcgtggttctcgcggtatcattgcagcactggggccagatggtaagccctcccgtatcgtagttatctacacgacggggagtcaggcaactatggatgaacgaaatagacagatcgctgagataggtgcctcactgattaagcattggtaactgtcagaccaagtttactcatatatactttagattgatttaaaacttcatttttaatttaaaaggatctaggtgaagatcctttttgataatctcatgaccaaaatcccttaacgtgagttttcgttccactgagcgtcagaccccgtagaaaagatcaaaggatcttcttgagatcctttttttctgcgcgtaatctgctgcttgcaaacaaaaaaaccaccgctaccagcggtggtttgtttgccggatcaagagctaccaactctttttccgaaggtaactggcttcagcagagcgcagataccaaatactgttcttctagtgtagccgtagttaggccaccacttcaagaactctgtagcaccgcctacatacctcgctctgctaatcctgttaccagtggctgctgccagtggcgataagtcgtgtcttaccgggttggactcaagacgatagttaccggataaggcgcagcggtcgggctgaacggggggttcgtgcacacagcccagcttggagcgaacgacctacaccgaactgagatacctacagcgtgagctatgagaaagcgccacgcttcccgaagggagaaaggcggacaggtatccggtaagcggcagggtcggaacaggagagcgcacgagggagcttccagggggaaacgcctggtatctttatagtcctgtcgggtttcgccacctctgacttgagcgtcgatttttgtgatgctcgtcaggggggcggagcctatggaaaaacgccagcaacgcggcctttttacggttcctggccttttgctggccttttgctcacat

SEQ ID NO: 303 - DNA, 5885 bp, Artificial sequence
  pCLS15794
ggtctttcctgcgttatcccctgattctgtggataaccgtattaccgcctttgagtgagctgataccgctcgccgcagccgaacgaccgagcgcagcgagtcagtgagcgaggaagcggagagcgcccaatacgcaaaccgcctctccccgcgcgttggccgattcattaatgcagctggcacgacaggtttcccgactggaaagcgggcagtgagcgcaacgcaattaatgtgagttagctcactcattaggcaccccaggctttacactttatgcttccggctcgtatgttgtgtggaattgtgagcggataacaatttcacacaggaaacagctatgaccatgattacgccaagcgcgtcaattaaccctcactaaagggaacaaaagctgttaattaagcgcgccacacgcaaacacaaatacacagcggccttgccaccatggtggatctacgcacgctcggctacagccagcagcaacaggagaagatcaaaccgaaggttcgttcgacagtggcgcagcaccacgaggcactggtcggccacgggtttacacacgcgcacatcgttgcgttaagccaacacccggcagcgttagggaccgtcgctgtcaagtatcaggacatgatcgcagcgttgccagaggcgacacacgaagcgatcgttggcgtcggcaaacagtggtccggcgcacgcgctctggaggccttgctcacggtggcgggagagttgagaggtccaccgttacagttggacacaggccaacttctcaagattgcaaaacgtggcggcgtgaccgcagtggaggcagtgcatgcatggcgcaatgcactgacgggtgccccgctcaacttgaccccccagcaggtggtggccatcgccagcaataatggtggcaagcaggcgctggagacggtccagcggctgttgccggtgctgtgccaggcccacggcttgaccccggagcaggtggtggccatcgccagccacgatggcggcaagcaggcgctggagacggtccagcggctgttgccggtgctgtgccaggcccacggcttgaccccccagcaggtggtggccatcgccagcaatggcggtggcaagcaggcgctggagacggtccagcggctgttgccggtgctgtgccaggcccacggcttgaccccccagcaggtggtggccatcgccagcaataatggtggcaagcaggcgctggagacggtccagcggctgttgccggtgctgtgccaggcccacggcttgaccccccagcaggtggtggccatcgccagcaatggcggtggcaagcaggcgctggagacggtccagcggctgttgccggtgctgtgccaggcccacggcttgaccccccagcaggtggtggccatcgccagcaataatggtggcaagcaggcgctggagacggtccagcggctgttgccggtgctgtgccaggcccacggcttgaccccggagcaggtggtggccatcgccagccacgatggcggcaagcaggcgctggagacggtccagcggctgttgccggtgctgtgccaggcccacggcttgaccccccagcaggtggtggccatcgccagcaatggcggtggcaagcaggcgctggagacggtccagcggctgttgccggtgctgtgccaggcccacggcttgaccccccagcaggtggtggccatcgccagcaataatggtggcaagcaggcgctggagacggtccagcggctgttgccggtgctgtgccaggcccacggcttgaccccccagcaggtggtggccatcgccagcaataatggtggcaagcaggcgctggagacggtccagcggctgttgccggtgctgtgccaggcccacggcttgaccccccagcaggtggtggccatcgccagcaatggcggtggcaagcaggcgctggagacggtccagcggctgttgccggtgctgtgccaggcccacggcttgaccccggagcaggtggtggccatcgccagccacgatggcggcaagcaggcgctggagacggtccagcggctgttgccggtgctgtgccaggcccacggcttgaccccggagcaggtggtggccatcgccagcaatattggtggcaagcaggcgctggagacggtgcaggcgctgttgccggtgctgtgccaggcccacggcttgacccctcagcaggtggtggccatcgccagcaatggcggcggcaggccggcgctggagagcattgttgcccagttatctcgccctgatccgggatccgacatcaccaaatctaaaatctctgaaaagatgaaaggccagggcccatccggaaataccaaatataacgaagagttcctgctgtacctggccggctttgtggacggtgacggtagcatcgttgctcagattaaaccacatcagtcttgtaagtttaaacatcagctacgtttgacctttaacgtgactcaaaagacccagcgccgttggtttctggacaaactagtggatgaaattggcgttggtcatgtatacgattctggtagcgtttcctactaccagttaagcgaaatcaagccgctgcacaacttcctgactcaactgcagccgtttctggaactgaaacagaaacaggcaaacctggttctgaaaattatcgaacagctgccgtctgcaaaagaatccccggacaaattcctggaagtttgtacctgggtggatcaggttgcagctctgaacgattctaagacgcgtaaaaccacttctgaaacctgtcgtgctgtgctggacagcctgagcgagaagaagaaatcctccccggcggccggtgattcctctgtttctaattccgagcacattgctcctctgtctctgccttcctctcctccatctgttggttctaacaaaaaattcctgctgtatcttgctggatttgtggattctgatggctccatcattgctcagataaaaccaaatcaatcttacaagttcaaacactacctctccttgaccttttgtgtcactcagaagacacaaagaaggtggttcttggacaaattggttgatcgtattggtgtgggctatgtccaggacagaggctctgtgtcagactaccgtctgtctgaaattaagcctcttcgtaactttctcacccaactgcaacccttcttgaagctcaaacagaagcaagcaaatctggttttgaaaatcatcgagcaactgccatctgccaaggagtcccctgacaagtttcttgaagtgtgtacttgggtggatcaggttgctgccttgaatgactccaagaccagaaaaaccacctctgagactgtgagggcagttctggatagcctctctgagaagaaaaagtcctctccttagtaactcgagcctgcagcagctgaagctttggacttctggcgcgcccaattcgccctatagtgagtcgtattacgtcgcgctcactggccgtcgttttacaacgtcgtgactgggaaaaccctggcgttacccaacttaatcgccttgcagcacatccccctttcgccagctggcgtaatagcgaagaggcccgcaccgaaacgcccttcccaacagttgcgcagcctgaatggcgaatgggagcgccctgtagcggcgcattaagcgcggcgggtgtggtggttacgcgcagcgtgaccgctacacttgccagcgccctagcgcccgctcctttcgctttcttcccttcctttctcgccacgttcgccggctttccccgtcaagctctaaatcgggggctccctttagggttccgatttagtgctttacggcacctcgaccccaaaaaacttgattagggtgatggttggcctgtagtgggccatagccctgatagacggtttttcgccctttgacgttggagtccacgttctttaatagtggactcttgttccaaactggaacaacactcaaccctatctcggtctattcttttgatttataagggattttgccgatttcggcctattggttaaaaaatgagctgatttaacaaaaatttaacgcgaattttaacaaaatattaacgcttacaatttaggtggcacttttcggggaaatgtgcgcggaacccctatttgtttatttttctaaatacattcaaatatgtatccgctcatgagacaataaccctgataaatgcttcaataatattgaaaaaggaagagtatgagtattcaacatttccgtgtcgcccttattcccttttttgcggcattttgccttcctgtttttgctcacccagaaacgctggtgaaagtaaaagatgctgaagatcagttgggtgcacgagtgggttacatcgaactggatctcaacagcggtaagatccttgagagttttcgccccgaagaacgttttccaatgatgagcacttttaaagttctgctatgtggcgcggtattatcccgtattgacgccgggcaagagcaactcggtcgccgcatacactattctcagaatgacttggttgagtactcaccagtcacagaaaagcatcttacggatggcatgacagtaagagaattatgcagtgctgccataaccatgagtgataacactgcggccaacttacttctgacaacgatcggaggaccgaaggagctaaccgcttttttgcacaacatgggggatcatgtaactcgccttgatcgttgggaaccggagctgaatgaagccataccaaacgacgagcgtgacaccacgatgcctgtagcaatggcaacaacgttgcgcaaactattaactggcgaactacttactctagcttcccggcaacaattaatagactggatggaggcggataaagttgcaggaccacttctgcgctcggcccttccggctggctggtttattgctgataaatctggagccggtgagcgtggttctcgcggtatcattgcagcactggggccagatggtaagccctcccgtatcgtagttatctacacgacggggagtcaggcaactatggatgaacgaaatagacagatcgctgagataggtgcctcactgattaagcattggtaactgtcagaccaagtttactcatatatactttagattgatttaaaacttcatttttaatttaaaaggatctaggtgaagatcctttttgataatctcatgaccaaaatcccttaacgtgagttttcgttccactgagcgtcagaccccgtagaaaagatcaaaggatcttcttgagatcctttttttctgcgcgtaatctgctgcttgcaaacaaaaaaaccaccgctaccagcggtggtttgtttgccggatcaagagctaccaactctttttccgaaggtaactggcttcagcagagcgcagataccaaatactgttcttctagtgtagccgtagttaggccaccacttcaagaactctgtagcaccgcctacatacctcgctctgctaatcctgttaccagtggctgctgccagtggcgataagtcgtgtcttaccgggttggactcaagacgatagttaccggataaggcgcagcggtcgggctgaacggggggttcgtgcacacagcccagcttggagcgaacgacctacaccgaactgagatacctacagcgtgagctatgagaaagcgccacgcttcccgaagggagaaaggcggacaggtatccggtaagcggcagggtcggaacaggagagcgcacgagggagcttccagggggaaacgcctggtatctttatagtcctgtcgggtttcgccacctctgacttgagcgtcgatttttgtgatgctcgtcaggggggcggagcctatggaaaaacgccagcaacgcggcctttttacggttcctggccttttgctggccttttgctcacat

SEQ ID NO: 304 - DNA, 10686 bp, Artificial sequence
  pCLS13449
atgtgagcaaaaggccagcaaaaggccaggaaccgtaaaaaggccgcgttgctggcgtttttccataggctccgcccccctgacgagcatcacaaaaatcgacgctcaagtcagaggtggcgaaacccgacaggactataaagataccaggcgtttccccctggaagctccctcgtgcgctctcctgttccgaccctgccgcttaccggatacctgtccgcctttctcccttcgggaagcgtggcgctttctcatagctcacgctgtaggtatctcagttcggtgtaggtcgttcgctccaagctgggctgtgtgcacgaaccccccgttcagcccgaccgctgcgccttatccggtaactatcgtcttgagtccaacccggtaagacacgacttatcgccactggcagcagccactggtaacaggattagcagagcgaggtatgtaggcggtgctacagagttcttgaagtggtggcctaactacggctacactagaaggacagtatttggtatctgcgctctgctgaagccagttaccttcggaaaaagagttggtagctcttgatccggcaaacaaaccaccgctggtagcggtggtttttttgtttgcaagcagcagattacgcgcagaaaaaaaggatctcaagaagatcctttgatcttttctacggggtctgacgctcagtggaacgaaaactcacgttaagggattttggtcatgagattatcaaaaaggatcttcacctagatccttttaaattaaaaatgaagttttaaatcaatctaaagtatatatgagtaaacttggtctgacagttaccaatgcttaatcagtgaggcacctatctcagcgatctgtctatttcgttcatccatagttgcctgactccccgtcgtgtagataactacgatacgggagggcttaccatctggccccagtgctgcaatgataccgcgagacccacgctcaccggctccagatttatcagcaataaaccagccagccggaagggccgagcgcagaagtggtcctgcaactttatccgcctccatccagtctattaattgttgccgggaagctagagtaagtagttcgccagttaatagtttgcgcaacgttgttgccattgctacaggcatcgtggtgtcacgctcgtcgtttggtatggcttcattcagctccggttcccaacgatcaaggcgagttacatgatcccccatgttgtgcaaaaaagcggttagctccttcggtcctccgatcgttgtcagaagtaagttggccgcagtgttatcactcatggttatggcagcactgcataattctcttactgtcatgccatccgtaagatgcttttctgtgactggtgagtactcaaccaagtcattctgagaatagtgtatgcggcgaccgagttgctcttgcccggcgtcaatacgggataataccgcgccacatagcagaactttaaaagtgctcatcattggaaaacgttcttcggggcgaaaactctcaaggatcttaccgctgttgagatccagttcgatgtaacccactcgtgcacccaactgatcttcagcatcttttactttcaccagcgtttctgggtgagcaaaaacaggaaggcaaaatgccgcaaaaaagggaataagggcgacacggaaatgttgaatactcatactcttcctttttcaatattattgaagcatttatcagggttattgtctcatgagcggatacatatttgaatgtatttagaaaaataaacaaataggggttccgcgcacatttccccgaaaagtgccacctgacgtccgatcaaaaatcatcgcttcgctgattaattaccccagaaataaggctaaaaaactaatcgcattatcatcctatggttgttaatttgattcgttcatttgaaggtttgtggggccaggttactgccaatttttcctcttcataaccataaaagctagtattgtagaatctttattgttcggagcagtgcggcgcgaggcacatctgcgtttcaggaacgcgaccggtgaagacgaggacgcacggaggagagtcttccttcggagggctgtcacccgctcggcggcttctaatccgtacttcaatatagcaatgagcagttaagcgtattactgaaagttccaaagagaaggtttttttaggctaatcgacctcgagcagatccgccaggcgtgtatatagcgtggatggccaggcaactttagtgctgacacatacaggcatatatatatgtgtgcgacgacacatgatcatatggcatgcatgtgctctgtatgtatataaaactcttgttttcttcttttctctaaatattctttccttatacattaggtcctttgtagcataaattactatacttctatagacacgcaaacacaaatacacagcggccttgccaccatggtggatctacgcacgctcggctacagccagcagcaacaggagaagatcaaaccgaaggttcgttcgacagtggcgcagcaccacgaggcactggtcggccacgggtttacacacgcgcacatcgttgcgttaagccaacacccggcagcgttagggaccgtcgctgtcaagtatcaggacatgatcgcagcgttgccagaggcgacacacgaagcgatcgttggcgtcggcaaacagtggtccggcgcacgcgctctggaggccttgctcacggtggcgggagagttgagaggtccaccgttacagttggacacaggccaacttctcaagattgcaaaacgtggcggcgtgaccgcagtggaggcagtgcatgcatggcgcaatgcactgacgggtgccccgctcaacttgaccccccagcaggtggtggccatcgccagcaataatggtggcaagcaggcgctggagacggtccagcggctgttgccggtgctgtgccaggcccacggcttgaccccggagcaggtggtggccatcgccagccacgatggcggcaagcaggcgctggagacggtccagcggctgttgccggtgctgtgccaggcccacggcttgaccccccagcaggtggtggccatcgccagcaatggcggtggcaagcaggcgctggagacggtccagcggctgttgccggtgctgtgccaggcccacggcttgaccccccagcaggtggtggccatcgccagcaataatggtggcaagcaggcgctggagacggtccagcggctgttgccggtgctgtgccaggcccacggcttgaccccccagcaggtggtggccatcgccagcaataatggtggcaagcaggcgctggagacggtccagcggctgttgccggtgctgtgccaggcccacggcttgaccccccagcaggtggtggccatcgccagcaatggcggtggcaagcaggcgctggagacggtccagcggctgttgccggtgctgtgccaggcccacggcttgaccccggagcaggtggtggccatcgccagccacgatggcggcaagcaggcgctggagacggtccagcggctgttgccggtgctgtgccaggcccacggcttgaccccggagcaggtggtggccatcgccagcaatattggtggcaagcaggcgctggagacggtgcaggcgctgttgccggtgctgtgccaggcccacggcttgaccccccagcaggtggtggccatcgccagcaataatggtggcaagcaggcgctggagacggtccagcggctgttgccggtgctgtgccaggcccacggcttgaccccggagcaggtggtggccatcgccagccacgatggcggcaagcaggcgctggagacggtccagcggctgttgccggtgctgtgccaggcccacggcttgaccccccagcaggtggtggccatcgccagcaataatggtggcaagcaggcgctggagacggtccagcggctgttgccggtgctgtgccaggcccacggcttgaccccggagcaggtggtggccatcgccagccacgatggcggcaagcaggcgctggagacggtccagcggctgttgccggtgctgtgccaggcccacggcttgaccccggagcaggtggtggccatcgccagccacgatggcggcaagcaggcgctggagacggtccagcggctgttgccggtgctgtgccaggcccacggcttgacccctcagcaggtggtggccatcgccagcaatggcggcggcaggccggcgctggagagcattgttgcccagttatctcgccctgatccgggatccgacatcaccaaatctaaaatctctgaaaagatgaaaggccagggcccatccggaaataccaaatataacgaagagttcctgctgtacctggccggctttgtggacggtgacggtagcatcgttgctcagattaaaccacatcagtcttgtaagtttaaacatcagctacgtttgacctttaacgtgactcaaaagacccagcgccgttggtttctggacaaactagtggatgaaattggcgttggtcatgtatacgattctggtagcgtttcctactaccagttaagcgaaatcaagccgctgcacaacttcctgactcaactgcagccgtttctggaactgaaacagaaacaggcaaacctggttctgaaaattatcgaacagctgccgtctgcaaaagaatccccggacaaattcctggaagtttgtacctgggtggatcaggttgcagctctgaacgattctaagacgcgtaaaaccacttctgaaaccgttcgtgctgtgctggacagcctgagcgagaagaagaaatcctccccggcggccgactgataactcgagcgatcctctagacgagctcctcgagcctgcagcagctgaagctttggacttcttcgccagaggtttggtcaagtctccaatcaaggttgtcggcttgtctaccttgccagaaatttacgaaaagatggaaaagggtcaaatcgttggtagatacgttgttgacacttctaaataagcgaatttcttatgatttatgatttttattattaaataagttataaaaaaaataagtgtatacaaattttaaagtgactcttaggttttaaaacgaaaattcttattcttgagtaactctttcctgtaggtcaggttgctttctcaggtatagcatgaggtcgctcttattgaccacacctctaccggcatgcaagcttggcgtaatcatggtcatagctgtttcctgtgtgaaattgttatccgctcacaattccacacaacatacgagccggaagcataaagtgtaaagcctggggtgcctaatgagtgagctaactcacattaattgcgttgcgctcactgcccgctttccagtcgggaaacctgtcgtgccagcagatctattacattatgggtggtatgttggaataaaaatcaactatcatctactaactagtatttacgttactagtatattatcatatacggtgttagaagatgacgcaaatgatgagaaatagtcatctaaattagtggaagctgaaacgcaaggattgataatgtaataggatcaatgaatattaacatataaaatgatgataataatatttatagaattgtgtagaattgcagattcccttttatggattcctaaatcctcgaggagaacttctagtatatctacatacctaatattattgccttattaaaaatggaatcccaacaattacatcaaaatccacattctcttcaaaatcaattgtcctgtacttccttgttcatgtgtgttcaaaaacgttatatttataggataattatactctatttctcaacaagtaattggttgtttggccgagcggtctaaggcgcctgattcaagaaatatcttgaccgcagttaactgtgggaatactcaggtatcgtaagatgcaagagttcgaatctcttagcaaccattatttttttcctcaacataacgagaacacacaggggcgctatcgcacagaatcaaattcgatgactggaaattttttgttaatttcagaggtcgcctgacgcatatacctttttcaactgaaaaattgggagaaaaaggaaaggtgagagccgcggaaccggcttttcatatagaatagagaagcgttcatgactaaatgcttgcatcacaatacttgaagttgacaatattatttaaggacctattgttttttccaataggtggttagcaatcgtcttactttctaacttttcttaccttttacatttcagcaatatatatatatatatttcaaggatataccattctaatgtctgcccctaagaagatcgtcgttttgccaggtgaccacgttggtcaagaaatcacagccgaagccattaaggttcttaaagctatttctgatgttcgttccaatgtcaagttcgatttcgaaaatcatttaattggtggtgctgctatcgatgctacaggtgtcccacttccagatgaggcgctggaagcctccaagaaggttgatgccgttttgttaggtgctgtgggtggtcctaaatggggtaccggtagtgttagacctgaacaaggtttactaaaaatccgtaaagaacttcaattgtacgccaacttaagaccatgtaactttgcatccgactctcttttagacttatctccaatcaagccacaatttgctaaaggtactgacttcgttgttgtcagagaattagtgggaggtatttactttggtaagagaaaggaagacgatggtgatggtgtcgcttgggatagtgaacaatacaccgttccagaagtgcaaagaatcacaagaatggccgctttcatggccctacaacatgagccaccattgcctatttggtccttggataaagctaatgttttggcctcttcaagattatggagaaaaactgtggaggaaaccatcaagaacgaattccctacattgaaggttcaacatcaattgattgattctgccgccatgatcctagttaagaacccaacccacctaaatggtattataatcaccagcaacatgtttggtgatatcatctccgatgaagcctccgttatcccaggttccttgggtttgttgccatctgcgtccttggcctctttgccagacaagaacaccgcatttggtttgtacgaaccatgccacggttctgctccagatttgccaaagaataaggtcaaccctatcgccactatcttgtctgctgcaatgatgttgaaattgtcattgaacttgcctgaagaaggtaaggccattgaagatgcagttaaaaaggttttggatgcaggtatcagaactggtgatttaggtggttccaacagtaccacggaagtcggtgatgctgtcgccgaagaagttaagaaaatccttgcttaaaaagattctctttttttatgatatttgtacataaactttataaatgaaattcataatagaaacgacacgaaattacaaaatggaatatgttcatagggtagacgaaactatatacgcaatctacatacatttatcaagaaggagaaaaaggaggatgtaaaggaatacaggtaagcaaattgatactaatggctcaacgtgataaggaaaaagaattgcactttaacattaatattgacaaggaggagggcaccacacaaaaagttaggtgtaacagaaaatcatgaaactatgattcctaatttatatattggaggattttctctaaaaaaaaaaaaatacaacaaataaaaaacactcaatgacctgaccatttgatggagtttaagtcaataccttcttgaaccatttcccataatggtgaaagttccctcaagaattttactctgtcagaaacggccttaacgacgtagtcgacctcctcttcagtactaaatctaccaataccaaatctgatggaagaatgggctaatgcatcatccttacccagcgcatgtaaaacataagaaggttctagggaagcagatgtacaggctgaacccgaggataatgcgatatcccttagtgccatcaataaagattctccttccacgtaggcgaaagaaacgttaacacaccctggataacgatgatctggagatccgttcaacgtggtatgttcagcggataatagacctttgactaatttatcggatagtcttttgatgtgagcttggtcgttgtcaaattctttcttcatcaatctcgcagcttcaccaaatcccgctaccaatgggggggccaaagtaccagatctgctgcattaatgaatcggccaacgcgcggggagaggcggtttgcgtattgggcgctcttccgcttcctcgctcactgactcgctgcgctcggtcgttcggctgcggcgagcggtatcagcatcgatgaattccacggactatagactatactagtatactccgtctactgtacgatacacttccgctcaggtccttgtcctttaacgaggccttaccactcttttgttactctattgatccagctcagcaaaggcagtgtgatctaagattctatcttcgcgatgtagtaaaactagctagaccgagaaagagactagaaatgcaaaaggcacttctacaatggctgccatcattattatccgatgtgacgctgcagcttctcaatgatattcgaatacgctttgaggagatacagcctaatatccgacaaactgttttacagatttacgatcgtacttgttacccatcattgaattttgaacatccgaacctgggagttttccctgaaacagatagtatatttgaacctgtataataatatatagtctagcgctttacggaagacaatgtatgtatttcggttcctggagaaactattgcatctattgcataggtaatcttgcacgtcgcatccccggttcattttctgcgtttccatcttgcacttcaatagcatatctttgttaacgaagcatctgtgcttcattttgtagaacaaaaatgcaacgcgagagcgctaatttttcaaacaaagaatctgagctgcatttttacagaacagaaatgcaacgcgaaagcgctattttaccaacgaagaatctgtgcttcatttttgtaaaacaaaaatgcaacgcgagagcgctaatttttcaaacaaagaatctgagctgcatttttacagaacagaaatgcaacgcgagagcgctattttaccaacaaagaatctatacttcttttttgttctacaaaaatgcatcccgagagcgctatttttctaacaaagcatcttagattactttttttctcctttgtgcgctctataatgcagtctcttgataactttttgcactgtaggtccgttaaggttagaagaaggctactttggtgtctattttctcttccataaaaaaagcctgactccacttcccgcgtttactgattactagcgaagctgcgggtgcattttttcaagataaaggcatccccgattatattctataccgatgtggattgcgcatactttgtgaacagaaagtgatagcgttgatgattcttcattggtcagaaaattatgaacggtttcttctattttgtctctatatactacgtataggaaatgtttacattttcgtattgttttcgattcactctatgaatagttcttactacaatttttttgtctaaagagtaatactagagataaacataaaaaatgtagaggtcgagtttagatgcaagttcaaggagcgaaaggtggatgggtaggttatatagggatatagcacagagatatatagcaaagagatacttttgagcaatgtttgtggaagcggtattcgcaatattttagtagctcgttacagtccggtgcgtttttggttttttgaaagtgcgtcttcagagcgcttttggttttcaaaagcgctctgaagttcctatactttctagagaataggaacttcggaataggaacttcaaagcgtttccgaaaacgagcgcttccgaaaatgcaacgcgagctgcgcacatacagctcactgttcacgtcgcacctatatctgcgtgttgcctgtatatatatatacatgagaagaacggcatagtgcgtgtttatgcttaaatgcgtacttatatgcgtctatttatgtaggatgaaaggtagtctagtacctcctgtgatattatcccattccatgcggggtatcgtatgcttccttcagcactaccctttagctgttctatatgctgccactcctcaattggattagtctcatccttcaatgctatcatttcctttgatattggatcatatgcatagtaccgagaaactagtgcgaagtagtgatcaggtattgctgttatctgatgagtatacgttgtcctggccacggcagaagcacgcttatcgctccaatttcccacaacattagtcaactccgttaggcccttcattgaaagaaatgaggtcatcaaatgtcttccaatgtgagattttgggccattttttatagcaaagattgaataaggcgcatttttcttcaaagctttattgtacgatctgactaagttatcttttaataattggtattcctgtttattgcttgaagaattgccggtcctatttactcgttttaggactggttcagaattcatcgatgctcactcaaaggtcggtaatacggttatccacagaatcaggggataacgcaggaaagaac

SEQ ID NO: 305 - DNA, 10686 bp, Artificial sequence
  pCLS13450
atgtgagcaaaaggccagcaaaaggccaggaaccgtaaaaaggccgcgttgctggcgtttttccataggctccgcccccctgacgagcatcacaaaaatcgacgctcaagtcagaggtggcgaaacccgacaggactataaagataccaggcgtttccccctggaagctccctcgtgcgctctcctgttccgaccctgccgcttaccggatacctgtccgcctttctcccttcgggaagcgtggcgctttctcatagctcacgctgtaggtatctcagttcggtgtaggtcgttcgctccaagctgggctgtgtgcacgaaccccccgttcagcccgaccgctgcgccttatccggtaactatcgtcttgagtccaacccggtaagacacgacttatcgccactggcagcagccactggtaacaggattagcagagcgaggtatgtaggcggtgctacagagttcttgaagtggtggcctaactacggctacactagaaggacagtatttggtatctgcgctctgctgaagccagttaccttcggaaaaagagttggtagctcttgatccggcaaacaaaccaccgctggtagcggtggtttttttgtttgcaagcagcagattacgcgcagaaaaaaaggatctcaagaagatcctttgatcttttctacggggtctgacgctcagtggaacgaaaactcacgttaagggattttggtcatgagattatcaaaaaggatcttcacctagatccttttaaattaaaaatgaagttttaaatcaatctaaagtatatatgagtaaacttggtctgacagttaccaatgcttaatcagtgaggcacctatctcagcgatctgtctatttcgttcatccatagttgcctgactccccgtcgtgtagataactacgatacgggagggcttaccatctggccccagtgctgcaatgataccgcgagacccacgctcaccggctccagatttatcagcaataaaccagccagccggaagggccgagcgcagaagtggtcctgcaactttatccgcctccatccagtctattaattgttgccgggaagctagagtaagtagttcgccagttaatagtttgcgcaacgttgttgccattgctacaggcatcgtggtgtcacgctcgtcgtttggtatggcttcattcagctccggttcccaacgatcaaggcgagttacatgatcccccatgttgtgcaaaaaagcggttagctccttcggtcctccgatcgttgtcagaagtaagttggccgcagtgttatcactcatggttatggcagcactgcataattctcttactgtcatgccatccgtaagatgcttttctgtgactggtgagtactcaaccaagtcattctgagaatagtgtatgcggcgaccgagttgctcttgcccggcgtcaatacgggataataccgcgccacatagcagaactttaaaagtgctcatcattggaaaacgttcttcggggcgaaaactctcaaggatcttaccgctgttgagatccagttcgatgtaacccactcgtgcacccaactgatcttcagcatcttttactttcaccagcgtttctgggtgagcaaaaacaggaaggcaaaatgccgcaaaaaagggaataagggcgacacggaaatgttgaatactcatactcttcctttttcaatattattgaagcatttatcagggttattgtctcatgagcggatacatatttgaatgtatttagaaaaataaacaaataggggttccgcgcacatttccccgaaaagtgccacctgacgtccgatcaaaaatcatcgcttcgctgattaattaccccagaaataaggctaaaaaactaatcgcattatcatcctatggttgttaatttgattcgttcatttgaaggtttgtggggccaggttactgccaatttttcctcttcataaccataaaagctagtattgtagaatctttattgttcggagcagtgcggcgcgaggcacatctgcgtttcaggaacgcgaccggtgaagacgaggacgcacggaggagagtcttccttcggagggctgtcacccgctcggcggcttctaatccgtacttcaatatagcaatgagcagttaagcgtattactgaaagttccaaagagaaggtttttttaggctaatcgacctcgagcagatccgccaggcgtgtatatagcgtggatggccaggcaactttagtgctgacacatacaggcatatatatatgtgtgcgacgacacatgatcatatggcatgcatgtgctctgtatgtatataaaactcttgttttcttcttttctctaaatattctttccttatacattaggtcctttgtagcataaattactatacttctatagacacgcaaacacaaatacacagcggccttgccaccatggtggatctacgcacgctcggctacagccagcagcaacaggagaagatcaaaccgaaggttcgttcgacagtggcgcagcaccacgaggcactggtcggccacgggtttacacacgcgcacatcgttgcgttaagccaacacccggcagcgttagggaccgtcgctgtcaagtatcaggacatgatcgcagcgttgccagaggcgacacacgaagcgatcgttggcgtcggcaaacagtggtccggcgcacgcgctctggaggccttgctcacggtggcgggagagttgagaggtccaccgttacagttggacacaggccaacttctcaagattgcaaaacgtggcggcgtgaccgcagtggaggcagtgcatgcatggcgcaatgcactgacgggtgccccgctcaacttgaccccccagcaggtggtggccatcgccagcaataatggtggcaagcaggcgctggagacggtccagcggctgttgccggtgctgtgccaggcccacggcttgaccccggagcaggtggtggccatcgccagccacgatggcggcaagcaggcgctggagacggtccagcggctgttgccggtgctgtgccaggcccacggcttgaccccccagcaggtggtggccatcgccagcaatggcggtggcaagcaggcgctggagacggtccagcggctgttgccggtgctgtgccaggcccacggcttgaccccccagcaggtggtggccatcgccagcaataatggtggcaagcaggcgctggagacggtccagcggctgttgccggtgctgtgccaggcccacggcttgaccccccagcaggtggtggccatcgccagcaatggcggtggcaagcaggcgctggagacggtccagcggctgttgccggtgctgtgccaggcccacggcttgaccccccagcaggtggtggccatcgccagcaataatggtggcaagcaggcgctggagacggtccagcggctgttgccggtgctgtgccaggcccacggcttgaccccggagcaggtggtggccatcgccagccacgatggcggcaagcaggcgctggagacggtccagcggctgttgccggtgctgtgccaggcccacggcttgaccccccagcaggtggtggccatcgccagcaatggcggtggcaagcaggcgctggagacggtccagcggctgttgccggtgctgtgccaggcccacggcttgaccccccagcaggtggtggccatcgccagcaataatggtggcaagcaggcgctggagacggtccagcggctgttgccggtgctgtgccaggcccacggcttgaccccccagcaggtggtggccatcgccagcaataatggtggcaagcaggcgctggagacggtccagcggctgttgccggtgctgtgccaggcccacggcttgaccccccagcaggtggtggccatcgccagcaatggcggtggcaagcaggcgctggagacggtccagcggctgttgccggtgctgtgccaggcccacggcttgaccccggagcaggtggtggccatcgccagccacgatggcggcaagcaggcgctggagacggtccagcggctgttgccggtgctgtgccaggcccacggcttgaccccggagcaggtggtggccatcgccagcaatattggtggcaagcaggcgctggagacggtgcaggcgctgttgccggtgctgtgccaggcccacggcttgacccctcagcaggtggtggccatcgccagcaatggcggcggcaggccggcgctggagagcattgttgcccagttatctcgccctgatccgggatccgacatcaccaaatctaaaatctctgaaaagatgaaaggccagggcccatccggaaataccaaatataacgaagagttcctgctgtacctggccggctttgtggacggtgacggtagcatcgttgctcagattaaaccacatcagtcttgtaagtttaaacatcagctacgtttgacctttaacgtgactcaaaagacccagcgccgttggtttctggacaaactagtggatgaaattggcgttggtcatgtatacgattctggtagcgtttcctactaccagttaagcgaaatcaagccgctgcacaacttcctgactcaactgcagccgtttctggaactgaaacagaaacaggcaaacctggttctgaaaattatcgaacagctgccgtctgcaaaagaatccccggacaaattcctggaagtttgtacctgggtggatcaggttgcagctctgaacgattctaagacgcgtaaaaccacttctgaaaccgttcgtgctgtgctggacagcctgagcgagaagaagaaatcctccccggcggccgactgataactcgagcgatcctctagacgagctcctcgagcctgcagcagctgaagctttggacttcttcgccagaggtttggtcaagtctccaatcaaggttgtcggcttgtctaccttgccagaaatttacgaaaagatggaaaagggtcaaatcgttggtagatacgttgttgacacttctaaataagcgaatttcttatgatttatgatttttattattaaataagttataaaaaaaataagtgtatacaaattttaaagtgactcttaggttttaaaacgaaaattcttattcttgagtaactctttcctgtaggtcaggttgctttctcaggtatagcatgaggtcgctcttattgaccacacctctaccggcatgcaagcttggcgtaatcatggtcatagctgtttcctgtgtgaaattgttatccgctcacaattccacacaacatacgagccggaagcataaagtgtaaagcctggggtgcctaatgagtgagctaactcacattaattgcgttgcgctcactgcccgctttccagtcgggaaacctgtcgtgccagcagatctattacattatgggtggtatgttggaataaaaatcaactatcatctactaactagtatttacgttactagtatattatcatatacggtgttagaagatgacgcaaatgatgagaaatagtcatctaaattagtggaagctgaaacgcaaggattgataatgtaataggatcaatgaatattaacatataaaatgatgataataatatttatagaattgtgtagaattgcagattcccttttatggattcctaaatcctcgaggagaacttctagtatatctacatacctaatattattgccttattaaaaatggaatcccaacaattacatcaaaatccacattctcttcaaaatcaattgtcctgtacttccttgttcatgtgtgttcaaaaacgttatatttataggataattatactctatttctcaacaagtaattggttgtttggccgagcggtctaaggcgcctgattcaagaaatatcttgaccgcagttaactgtgggaatactcaggtatcgtaagatgcaagagttcgaatctcttagcaaccattatttttttcctcaacataacgagaacacacaggggcgctatcgcacagaatcaaattcgatgactggaaattttttgttaatttcagaggtcgcctgacgcatatacctttttcaactgaaaaattgggagaaaaaggaaaggtgagagccgcggaaccggcttttcatatagaatagagaagcgttcatgactaaatgcttgcatcacaatacttgaagttgacaatattatttaaggacctattgttttttccaataggtggttagcaatcgtcttactttctaacttttcttaccttttacatttcagcaatatatatatatatatttcaaggatataccattctaatgtctgcccctaagaagatcgtcgttttgccaggtgaccacgttggtcaagaaatcacagccgaagccattaaggttcttaaagctatttctgatgttcgttccaatgtcaagttcgatttcgaaaatcatttaattggtggtgctgctatcgatgctacaggtgtcccacttccagatgaggcgctggaagcctccaagaaggttgatgccgttttgttaggtgctgtgggtggtcctaaatggggtaccggtagtgttagacctgaacaaggtttactaaaaatccgtaaagaacttcaattgtacgccaacttaagaccatgtaactttgcatccgactctcttttagacttatctccaatcaagccacaatttgctaaaggtactgacttcgttgttgtcagagaattagtgggaggtatttactttggtaagagaaaggaagacgatggtgatggtgtcgcttgggatagtgaacaatacaccgttccagaagtgcaaagaatcacaagaatggccgctttcatggccctacaacatgagccaccattgcctatttggtccttggataaagctaatgttttggcctcttcaagattatggagaaaaactgtggaggaaaccatcaagaacgaattccctacattgaaggttcaacatcaattgattgattctgccgccatgatcctagttaagaacccaacccacctaaatggtattataatcaccagcaacatgtttggtgatatcatctccgatgaagcctccgttatcccaggttccttgggtttgttgccatctgcgtccttggcctctttgccagacaagaacaccgcatttggtttgtacgaaccatgccacggttctgctccagatttgccaaagaataaggtcaaccctatcgccactatcttgtctgctgcaatgatgttgaaattgtcattgaacttgcctgaagaaggtaaggccattgaagatgcagttaaaaaggttttggatgcaggtatcagaactggtgatttaggtggttccaacagtaccacggaagtcggtgatgctgtcgccgaagaagttaagaaaatccttgcttaaaaagattctctttttttatgatatttgtacataaactttataaatgaaattcataatagaaacgacacgaaattacaaaatggaatatgttcatagggtagacgaaactatatacgcaatctacatacatttatcaagaaggagaaaaaggaggatgtaaaggaatacaggtaagcaaattgatactaatggctcaacgtgataaggaaaaagaattgcactttaacattaatattgacaaggaggagggcaccacacaaaaagttaggtgtaacagaaaatcatgaaactatgattcctaatttatatattggaggattttctctaaaaaaaaaaaaatacaacaaataaaaaacactcaatgacctgaccatttgatggagtttaagtcaataccttcttgaaccatttcccataatggtgaaagttccctcaagaattttactctgtcagaaacggccttaacgacgtagtcgacctcctcttcagtactaaatctaccaataccaaatctgatggaagaatgggctaatgcatcatccttacccagcgcatgtaaaacataagaaggttctagggaagcagatgtacaggctgaacccgaggataatgcgatatcccttagtgccatcaataaagattctccttccacgtaggcgaaagaaacgttaacacaccctggataacgatgatctggagatccgttcaacgtggtatgttcagcggataatagacctttgactaatttatcggatagtcttttgatgtgagcttggtcgttgtcaaattctttcttcatcaatctcgcagcttcaccaaatcccgctaccaatgggggggccaaagtaccagatctgctgcattaatgaatcggccaacgcgcggggagaggcggtttgcgtattgggcgctcttccgcttcctcgctcactgactcgctgcgctcggtcgttcggctgcggcgagcggtatcagcatcgatgaattccacggactatagactatactagtatactccgtctactgtacgatacacttccgctcaggtccttgtcctttaacgaggccttaccactcttttgttactctattgatccagctcagcaaaggcagtgtgatctaagattctatcttcgcgatgtagtaaaactagctagaccgagaaagagactagaaatgcaaaaggcacttctacaatggctgccatcattattatccgatgtgacgctgcagcttctcaatgatattcgaatacgctttgaggagatacagcctaatatccgacaaactgttttacagatttacgatcgtacttgttacccatcattgaattttgaacatccgaacctgggagttttccctgaaacagatagtatatttgaacctgtataataatatatagtctagcgctttacggaagacaatgtatgtatttcggttcctggagaaactattgcatctattgcataggtaatcttgcacgtcgcatccccggttcattttctgcgtttccatcttgcacttcaatagcatatctttgttaacgaagcatctgtgcttcattttgtagaacaaaaatgcaacgcgagagcgctaatttttcaaacaaagaatctgagctgcatttttacagaacagaaatgcaacgcgaaagcgctattttaccaacgaagaatctgtgcttcatttttgtaaaacaaaaatgcaacgcgagagcgctaatttttcaaacaaagaatctgagctgcatttttacagaacagaaatgcaacgcgagagcgctattttaccaacaaagaatctatacttcttttttgttctacaaaaatgcatcccgagagcgctatttttctaacaaagcatcttagattactttttttctcctttgtgcgctctataatgcagtctcttgataactttttgcactgtaggtccgttaaggttagaagaaggctactttggtgtctattttctcttccataaaaaaagcctgactccacttcccgcgtttactgattactagcgaagctgcgggtgcattttttcaagataaaggcatccccgattatattctataccgatgtggattgcgcatactttgtgaacagaaagtgatagcgttgatgattcttcattggtcagaaaattatgaacggtttcttctattttgtctctatatactacgtataggaaatgtttacattttcgtattgttttcgattcactctatgaatagttcttactacaatttttttgtctaaagagtaatactagagataaacataaaaaatgtagaggtcgagtttagatgcaagttcaaggagcgaaaggtggatgggtaggttatatagggatatagcacagagatatatagcaaagagatacttttgagcaatgtttgtggaagcggtattcgcaatattttagtagctcgttacagtccggtgcgtttttggttttttgaaagtgcgtcttcagagcgcttttggttttcaaaagcgctctgaagttcctatactttctagagaataggaacttcggaataggaacttcaaagcgtttccgaaaacgagcgcttccgaaaatgcaacgcgagctgcgcacatacagctcactgttcacgtcgcacctatatctgcgtgttgcctgtatatatatatacatgagaagaacggcatagtgcgtgtttatgcttaaatgcgtacttatatgcgtctatttatgtaggatgaaaggtagtctagtacctcctgtgatattatcccattccatgcggggtatcgtatgcttccttcagcactaccctttagctgttctatatgctgccactcctcaattggattagtctcatccttcaatgctatcatttcctttgatattggatcatatgcatagtaccgagaaactagtgcgaagtagtgatcaggtattgctgttatctgatgagtatacgttgtcctggccacggcagaagcacgcttatcgctccaatttcccacaacattagtcaactccgttaggcccttcattgaaagaaatgaggtcatcaaatgtcttccaatgtgagattttgggccattttttatagcaaagattgaataaggcgcatttttcttcaaagctttattgtacgatctgactaagttatcttttaataattggtattcctgtttattgcttgaagaattgccggtcctatttactcgttttaggactggttcagaattcatcgatgctcactcaaaggtcggtaatacggttatccacagaatcaggggataacgcaggaaagaac

SEQ ID NO: 306 - DNA, 10686 bp, Artificial sequence
  pCLS13451
atgtgagcaaaaggccagcaaaaggccaggaaccgtaaaaaggccgcgttgctggcgtttttccataggctccgcccccctgacgagcatcacaaaaatcgacgctcaagtcagaggtggcgaaacccgacaggactataaagataccaggcgtttccccctggaagctccctcgtgcgctctcctgttccgaccctgccgcttaccggatacctgtccgcctttctcccttcgggaagcgtggcgctttctcatagctcacgctgtaggtatctcagttcggtgtaggtcgttcgctccaagctgggctgtgtgcacgaaccccccgttcagcccgaccgctgcgccttatccggtaactatcgtcttgagtccaacccggtaagacacgacttatcgccactggcagcagccactggtaacaggattagcagagcgaggtatgtaggcggtgctacagagttcttgaagtggtggcctaactacggctacactagaaggacagtatttggtatctgcgctctgctgaagccagttaccttcggaaaaagagttggtagctcttgatccggcaaacaaaccaccgctggtagcggtggtttttttgtttgcaagcagcagattacgcgcagaaaaaaaggatctcaagaagatcctttgatcttttctacggggtctgacgctcagtggaacgaaaactcacgttaagggattttggtcatgagattatcaaaaaggatcttcacctagatccttttaaattaaaaatgaagttttaaatcaatctaaagtatatatgagtaaacttggtctgacagttaccaatgcttaatcagtgaggcacctatctcagcgatctgtctatttcgttcatccatagttgcctgactccccgtcgtgtagataactacgatacgggagggcttaccatctggccccagtgctgcaatgataccgcgagacccacgctcaccggctccagatttatcagcaataaaccagccagccggaagggccgagcgcagaagtggtcctgcaactttatccgcctccatccagtctattaattgttgccgggaagctagagtaagtagttcgccagttaatagtttgcgcaacgttgttgccattgctacaggcatcgtggtgtcacgctcgtcgtttggtatggcttcattcagctccggttcccaacgatcaaggcgagttacatgatcccccatgttgtgcaaaaaagcggttagctccttcggtcctccgatcgttgtcagaagtaagttggccgcagtgttatcactcatggttatggcagcactgcataattctcttactgtcatgccatccgtaagatgcttttctgtgactggtgagtactcaaccaagtcattctgagaatagtgtatgcggcgaccgagttgctcttgcccggcgtcaatacgggataataccgcgccacatagcagaactttaaaagtgctcatcattggaaaacgttcttcggggcgaaaactctcaaggatcttaccgctgttgagatccagttcgatgtaacccactcgtgcacccaactgatcttcagcatcttttactttcaccagcgtttctgggtgagcaaaaacaggaaggcaaaatgccgcaaaaaagggaataagggcgacacggaaatgttgaatactcatactcttcctttttcaatattattgaagcatttatcagggttattgtctcatgagcggatacatatttgaatgtatttagaaaaataaacaaataggggttccgcgcacatttccccgaaaagtgccacctgacgtccgatcaaaaatcatcgcttcgctgattaattaccccagaaataaggctaaaaaactaatcgcattatcatcctatggttgttaatttgattcgttcatttgaaggtttgtggggccaggttactgccaatttttcctcttcataaccataaaagctagtattgtagaatctttattgttcggagcagtgcggcgcgaggcacatctgcgtttcaggaacgcgaccggtgaagacgaggacgcacggaggagagtcttccttcggagggctgtcacccgctcggcggcttctaatccgtacttcaatatagcaatgagcagttaagcgtattactgaaagttccaaagagaaggtttttttaggctaatcgacctcgagcagatccgccaggcgtgtatatagcgtggatggccaggcaactttagtgctgacacatacaggcatatatatatgtgtgcgacgacacatgatcatatggcatgcatgtgctctgtatgtatataaaactcttgttttcttcttttctctaaatattctttccttatacattaggtcctttgtagcataaattactatacttctatagacacgcaaacacaaatacacagcggccttgccaccatggtggatctacgcacgctcggctacagccagcagcaacaggagaagatcaaaccgaaggttcgttcgacagtggcgcagcaccacgaggcactggtcggccacgggtttacacacgcgcacatcgttgcgttaagccaacacccggcagcgttagggaccgtcgctgtcaagtatcaggacatgatcgcagcgttgccagaggcgacacacgaagcgatcgttggcgtcggcaaacagtggtccggcgcacgcgctctggaggccttgctcacggtggcgggagagttgagaggtccaccgttacagttggacacaggccaacttctcaagattgcaaaacgtggcggcgtgaccgcagtggaggcagtgcatgcatggcgcaatgcactgacgggtgccccgctcaacttgaccccccagcaggtggtggccatcgccagcaataatggtggcaagcaggcgctggagacggtccagcggctgttgccggtgctgtgccaggcccacggcttgaccccccagcaggtggtggccatcgccagcaatggcggtggcaagcaggcgctggagacggtccagcggctgttgccggtgctgtgccaggcccacggcttgaccccggagcaggtggtggccatcgccagcaatattggtggcaagcaggcgctggagacggtgcaggcgctgttgccggtgctgtgccaggcccacggcttgaccccccagcaggtggtggccatcgccagcaatggcggtggcaagcaggcgctggagacggtccagcggctgttgccggtgctgtgccaggcccacggcttgaccccccagcaggtggtggccatcgccagcaataatggtggcaagcaggcgctggagacggtccagcggctgttgccggtgctgtgccaggcccacggcttgaccccggagcaggtggtggccatcgccagccacgatggcggcaagcaggcgctggagacggtccagcggctgttgccggtgctgtgccaggcccacggcttgaccccccagcaggtggtggccatcgccagcaatggcggtggcaagcaggcgctggagacggtccagcggctgttgccggtgctgtgccaggcccacggcttgaccccccagcaggtggtggccatcgccagcaataatggtggcaagcaggcgctggagacggtccagcggctgttgccggtgctgtgccaggcccacggcttgaccccccagcaggtggtggccatcgccagcaatggcggtggcaagcaggcgctggagacggtccagcggctgttgccggtgctgtgccaggcccacggcttgaccccccagcaggtggtggccatcgccagcaataatggtggcaagcaggcgctggagacggtccagcggctgttgccggtgctgtgccaggcccacggcttgaccccggagcaggtggtggccatcgccagccacgatggcggcaagcaggcgctggagacggtccagcggctgttgccggtgctgtgccaggcccacggcttgaccccccagcaggtggtggccatcgccagcaatggcggtggcaagcaggcgctggagacggtccagcggctgttgccggtgctgtgccaggcccacggcttgaccccccagcaggtggtggccatcgccagcaataatggtggcaagcaggcgctggagacggtccagcggctgttgccggtgctgtgccaggcccacggcttgacccctcagcaggtggtggccatcgccagcaatggcggcggcaggccggcgctggagagcattgttgcccagttatctcgccctgatccgggatccgacatcaccaaatctaaaatctctgaaaagatgaaaggccagggcccatccggaaataccaaatataacgaagagttcctgctgtacctggccggctttgtggacggtgacggtagcatcgttgctcagattaaaccacatcagtcttgtaagtttaaacatcagctacgtttgacctttaacgtgactcaaaagacccagcgccgttggtttctggacaaactagtggatgaaattggcgttggtcatgtatacgattctggtagcgtttcctactaccagttaagcgaaatcaagccgctgcacaacttcctgactcaactgcagccgtttctggaactgaaacagaaacaggcaaacctggttctgaaaattatcgaacagctgccgtctgcaaaagaatccccggacaaattcctggaagtttgtacctgggtggatcaggttgcagctctgaacgattctaagacgcgtaaaaccacttctgaaaccgttcgtgctgtgctggacagcctgagcgagaagaagaaatcctccccggcggccgactgataactcgagcgatcctctagacgagctcctcgagcctgcagcagctgaagctttggacttcttcgccagaggtttggtcaagtctccaatcaaggttgtcggcttgtctaccttgccagaaatttacgaaaagatggaaaagggtcaaatcgttggtagatacgttgttgacacttctaaataagcgaatttcttatgatttatgatttttattattaaataagttataaaaaaaataagtgtatacaaattttaaagtgactcttaggttttaaaacgaaaattcttattcttgagtaactctttcctgtaggtcaggttgctttctcaggtatagcatgaggtcgctcttattgaccacacctctaccggcatgcaagcttggcgtaatcatggtcatagctgtttcctgtgtgaaattgttatccgctcacaattccacacaacatacgagccggaagcataaagtgtaaagcctggggtgcctaatgagtgagctaactcacattaattgcgttgcgctcactgcccgctttccagtcgggaaacctgtcgtgccagcagatctattacattatgggtggtatgttggaataaaaatcaactatcatctactaactagtatttacgttactagtatattatcatatacggtgttagaagatgacgcaaatgatgagaaatagtcatctaaattagtggaagctgaaacgcaaggattgataatgtaataggatcaatgaatattaacatataaaatgatgataataatatttatagaattgtgtagaattgcagattcccttttatggattcctaaatcctcgaggagaacttctagtatatctacatacctaatattattgccttattaaaaatggaatcccaacaattacatcaaaatccacattctcttcaaaatcaattgtcctgtacttccttgttcatgtgtgttcaaaaacgttatatttataggataattatactctatttctcaacaagtaattggttgtttggccgagcggtctaaggcgcctgattcaagaaatatcttgaccgcagttaactgtgggaatactcaggtatcgtaagatgcaagagttcgaatctcttagcaaccattatttttttcctcaacataacgagaacacacaggggcgctatcgcacagaatcaaattcgatgactggaaattttttgttaatttcagaggtcgcctgacgcatatacctttttcaactgaaaaattgggagaaaaaggaaaggtgagagccgcggaaccggcttttcatatagaatagagaagcgttcatgactaaatgcttgcatcacaatacttgaagttgacaatattatttaaggacctattgttttttccaataggtggttagcaatcgtcttactttctaacttttcttaccttttacatttcagcaatatatatatatatatttcaaggatataccattctaatgtctgcccctaagaagatcgtcgttttgccaggtgaccacgttggtcaagaaatcacagccgaagccattaaggttcttaaagctatttctgatgttcgttccaatgtcaagttcgatttcgaaaatcatttaattggtggtgctgctatcgatgctacaggtgtcccacttccagatgaggcgctggaagcctccaagaaggttgatgccgttttgttaggtgctgtgggtggtcctaaatggggtaccggtagtgttagacctgaacaaggtttactaaaaatccgtaaagaacttcaattgtacgccaacttaagaccatgtaactttgcatccgactctcttttagacttatctccaatcaagccacaatttgctaaaggtactgacttcgttgttgtcagagaattagtgggaggtatttactttggtaagagaaaggaagacgatggtgatggtgtcgcttgggatagtgaacaatacaccgttccagaagtgcaaagaatcacaagaatggccgctttcatggccctacaacatgagccaccattgcctatttggtccttggataaagctaatgttttggcctcttcaagattatggagaaaaactgtggaggaaaccatcaagaacgaattccctacattgaaggttcaacatcaattgattgattctgccgccatgatcctagttaagaacccaacccacctaaatggtattataatcaccagcaacatgtttggtgatatcatctccgatgaagcctccgttatcccaggttccttgggtttgttgccatctgcgtccttggcctctttgccagacaagaacaccgcatttggtttgtacgaaccatgccacggttctgctccagatttgccaaagaataaggtcaaccctatcgccactatcttgtctgctgcaatgatgttgaaattgtcattgaacttgcctgaagaaggtaaggccattgaagatgcagttaaaaaggttttggatgcaggtatcagaactggtgatttaggtggttccaacagtaccacggaagtcggtgatgctgtcgccgaagaagttaagaaaatccttgcttaaaaagattctctttttttatgatatttgtacataaactttataaatgaaattcataatagaaacgacacgaaattacaaaatggaatatgttcatagggtagacgaaactatatacgcaatctacatacatttatcaagaaggagaaaaaggaggatgtaaaggaatacaggtaagcaaattgatactaatggctcaacgtgataaggaaaaagaattgcactttaacattaatattgacaaggaggagggcaccacacaaaaagttaggtgtaacagaaaatcatgaaactatgattcctaatttatatattggaggattttctctaaaaaaaaaaaaatacaacaaataaaaaacactcaatgacctgaccatttgatggagtttaagtcaataccttcttgaaccatttcccataatggtgaaagttccctcaagaattttactctgtcagaaacggccttaacgacgtagtcgacctcctcttcagtactaaatctaccaataccaaatctgatggaagaatgggctaatgcatcatccttacccagcgcatgtaaaacataagaaggttctagggaagcagatgtacaggctgaacccgaggataatgcgatatcccttagtgccatcaataaagattctccttccacgtaggcgaaagaaacgttaacacaccctggataacgatgatctggagatccgttcaacgtggtatgttcagcggataatagacctttgactaatttatcggatagtcttttgatgtgagcttggtcgttgtcaaattctttcttcatcaatctcgcagcttcaccaaatcccgctaccaatgggggggccaaagtaccagatctgctgcattaatgaatcggccaacgcgcggggagaggcggtttgcgtattgggcgctcttccgcttcctcgctcactgactcgctgcgctcggtcgttcggctgcggcgagcggtatcagcatcgatgaattccacggactatagactatactagtatactccgtctactgtacgatacacttccgctcaggtccttgtcctttaacgaggccttaccactcttttgttactctattgatccagctcagcaaaggcagtgtgatctaagattctatcttcgcgatgtagtaaaactagctagaccgagaaagagactagaaatgcaaaaggcacttctacaatggctgccatcattattatccgatgtgacgctgcagcttctcaatgatattcgaatacgctttgaggagatacagcctaatatccgacaaactgttttacagatttacgatcgtacttgttacccatcattgaattttgaacatccgaacctgggagttttccctgaaacagatagtatatttgaacctgtataataatatatagtctagcgctttacggaagacaatgtatgtatttcggttcctggagaaactattgcatctattgcataggtaatcttgcacgtcgcatccccggttcattttctgcgtttccatcttgcacttcaatagcatatctttgttaacgaagcatctgtgcttcattttgtagaacaaaaatgcaacgcgagagcgctaatttttcaaacaaagaatctgagctgcatttttacagaacagaaatgcaacgcgaaagcgctattttaccaacgaagaatctgtgcttcatttttgtaaaacaaaaatgcaacgcgagagcgctaatttttcaaacaaagaatctgagctgcatttttacagaacagaaatgcaacgcgagagcgctattttaccaacaaagaatctatacttcttttttgttctacaaaaatgcatcccgagagcgctatttttctaacaaagcatcttagattactttttttctcctttgtgcgctctataatgcagtctcttgataactttttgcactgtaggtccgttaaggttagaagaaggctactttggtgtctattttctcttccataaaaaaagcctgactccacttcccgcgtttactgattactagcgaagctgcgggtgcattttttcaagataaaggcatccccgattatattctataccgatgtggattgcgcatactttgtgaacagaaagtgatagcgttgatgattcttcattggtcagaaaattatgaacggtttcttctattttgtctctatatactacgtataggaaatgtttacattttcgtattgttttcgattcactctatgaatagttcttactacaatttttttgtctaaagagtaatactagagataaacataaaaaatgtagaggtcgagtttagatgcaagttcaaggagcgaaaggtggatgggtaggttatatagggatatagcacagagatatatagcaaagagatacttttgagcaatgtttgtggaagcggtattcgcaatattttagtagctcgttacagtccggtgcgtttttggttttttgaaagtgcgtcttcagagcgcttttggttttcaaaagcgctctgaagttcctatactttctagagaataggaacttcggaataggaacttcaaagcgtttccgaaaacgagcgcttccgaaaatgcaacgcgagctgcgcacatacagctcactgttcacgtcgcacctatatctgcgtgttgcctgtatatatatatacatgagaagaacggcatagtgcgtgtttatgcttaaatgcgtacttatatgcgtctatttatgtaggatgaaaggtagtctagtacctcctgtgatattatcccattccatgcggggtatcgtatgcttccttcagcactaccctttagctgttctatatgctgccactcctcaattggattagtctcatccttcaatgctatcatttcctttgatattggatcatatgcatagtaccgagaaactagtgcgaagtagtgatcaggtattgctgttatctgatgagtatacgttgtcctggccacggcagaagcacgcttatcgctccaatttcccacaacattagtcaactccgttaggcccttcattgaaagaaatgaggtcatcaaatgtcttccaatgtgagattttgggccattttttatagcaaagattgaataaggcgcatttttcttcaaagctttattgtacgatctgactaagttatcttttaataattggtattcctgtttattgcttgaagaattgccggtcctatttactcgttttaggactggttcagaattcatcgatgctcactcaaaggtcggtaatacggttatccacagaatcaggggataacgcaggaaagaac

SEQ ID NO: 307 - DNA, 10686 bp, Artificial sequence
  pCLS15148
atgtgagcaaaaggccagcaaaaggccaggaaccgtaaaaaggccgcgttgctggcgtttttccataggctccgcccccctgacgagcatcacaaaaatcgacgctcaagtcagaggtggcgaaacccgacaggactataaagataccaggcgtttccccctggaagctccctcgtgcgctctcctgttccgaccctgccgcttaccggatacctgtccgcctttctcccttcgggaagcgtggcgctttctcatagctcacgctgtaggtatctcagttcggtgtaggtcgttcgctccaagctgggctgtgtgcacgaaccccccgttcagcccgaccgctgcgccttatccggtaactatcgtcttgagtccaacccggtaagacacgacttatcgccactggcagcagccactggtaacaggattagcagagcgaggtatgtaggcggtgctacagagttcttgaagtggtggcctaactacggctacactagaaggacagtatttggtatctgcgctctgctgaagccagttaccttcggaaaaagagttggtagctcttgatccggcaaacaaaccaccgctggtagcggtggtttttttgtttgcaagcagcagattacgcgcagaaaaaaaggatctcaagaagatcctttgatcttttctacggggtctgacgctcagtggaacgaaaactcacgttaagggattttggtcatgagattatcaaaaaggatcttcacctagatccttttaaattaaaaatgaagttttaaatcaatctaaagtatatatgagtaaacttggtctgacagttaccaatgcttaatcagtgaggcacctatctcagcgatctgtctatttcgttcatccatagttgcctgactccccgtcgtgtagataactacgatacgggagggcttaccatctggccccagtgctgcaatgataccgcgagacccacgctcaccggctccagatttatcagcaataaaccagccagccggaagggccgagcgcagaagtggtcctgcaactttatccgcctccatccagtctattaattgttgccgggaagctagagtaagtagttcgccagttaatagtttgcgcaacgttgttgccattgctacaggcatcgtggtgtcacgctcgtcgtttggtatggcttcattcagctccggttcccaacgatcaaggcgagttacatgatcccccatgttgtgcaaaaaagcggttagctccttcggtcctccgatcgttgtcagaagtaagttggccgcagtgttatcactcatggttatggcagcactgcataattctcttactgtcatgccatccgtaagatgcttttctgtgactggtgagtactcaaccaagtcattctgagaatagtgtatgcggcgaccgagttgctcttgcccggcgtcaatacgggataataccgcgccacatagcagaactttaaaagtgctcatcattggaaaacgttcttcggggcgaaaactctcaaggatcttaccgctgttgagatccagttcgatgtaacccactcgtgcacccaactgatcttcagcatcttttactttcaccagcgtttctgggtgagcaaaaacaggaaggcaaaatgccgcaaaaaagggaataagggcgacacggaaatgttgaatactcatactcttcctttttcaatattattgaagcatttatcagggttattgtctcatgagcggatacatatttgaatgtatttagaaaaataaacaaataggggttccgcgcacatttccccgaaaagtgccacctgacgtccgatcaaaaatcatcgcttcgctgattaattaccccagaaataaggctaaaaaactaatcgcattatcatcctatggttgttaatttgattcgttcatttgaaggtttgtggggccaggttactgccaatttttcctcttcataaccataaaagctagtattgtagaatctttattgttcggagcagtgcggcgcgaggcacatctgcgtttcaggaacgcgaccggtgaagacgaggacgcacggaggagagtcttccttcggagggctgtcacccgctcggcggcttctaatccgtacttcaatatagcaatgagcagttaagcgtattactgaaagttccaaagagaaggtttttttaggctaatcgacctcgagcagatccgccaggcgtgtatatagcgtggatggccaggcaactttagtgctgacacatacaggcatatatatatgtgtgcgacgacacatgatcatatggcatgcatgtgctctgtatgtatataaaactcttgttttcttcttttctctaaatattctttccttatacattaggtcctttgtagcataaattactatacttctatagacacgcaaacacaaatacacagcggccttgccaccatggtggatctacgcacgctcggctacagccagcagcaacaggagaagatcaaaccgaaggttcgttcgacagtggcgcagcaccacgaggcactggtcggccacgggtttacacacgcgcacatcgttgcgttaagccaacacccggcagcgttagggaccgtcgctgtcaagtatcaggacatgatcgcagcgttgccagaggcgacacacgaagcgatcgttggcgtcggcaaacagtggtccggcgcacgcgctctggaggccttgctcacggtggcgggagagttgagaggtccaccgttacagttggacacaggccaacttctcaagattgcaaaacgtggcggcgtgaccgcagtggaggcagtgcatgcatggcgcaatgcactgacgggtgccccgctcaacttgaccccccagcaggtggtggccatcgccagcaataatggtggcaagcaggcgctggagacggtccagcggctgttgccggtgctgtgccaggcccacggcttgaccccggagcaggtggtggccatcgccagccacgatggcggcaagcaggcgctggagacggtccagcggctgttgccggtgctgtgccaggcccacggcttgaccccccagcaggtggtggccatcgccagcaatggcggtggcaagcaggcgctggagacggtccagcggctgttgccggtgctgtgccaggcccacggcttgaccccccagcaggtggtggccatcgccagcaataatggtggcaagcaggcgctggagacggtccagcggctgttgccggtgctgtgccaggcccacggcttgaccccccagcaggtggtggccatcgccagcaatggcggtggcaagcaggcgctggagacggtccagcggctgttgccggtgctgtgccaggcccacggcttgaccccccagcaggtggtggccatcgccagcaataatggtggcaagcaggcgctggagacggtccagcggctgttgccggtgctgtgccaggcccacggcttgaccccggagcaggtggtggccatcgccagccacgatggcggcaagcaggcgctggagacggtccagcggctgttgccggtgctgtgccaggcccacggcttgaccccccagcaggtggtggccatcgccagcaatggcggtggcaagcaggcgctggagacggtccagcggctgttgccggtgctgtgccaggcccacggcttgaccccccagcaggtggtggccatcgccagcaataatggtggcaagcaggcgctggagacggtccagcggctgttgccggtgctgtgccaggcccacggcttgaccccccagcaggtggtggccatcgccagcaataatggtggcaagcaggcgctggagacggtccagcggctgttgccggtgctgtgccaggcccacggcttgaccccccagcaggtggtggccatcgccagcaatggcggtggcaagcaggcgctggagacggtccagcggctgttgccggtgctgtgccaggcccacggcttgaccccggagcaggtggtggccatcgccagccacgatggcggcaagcaggcgctggagacggtccagcggctgttgccggtgctgtgccaggcccacggcttgaccccggagcaggtggtggccatcgccagcaatattggtggcaagcaggcgctggagacggtgcaggcgctgttgccggtgctgtgccaggcccacggcttgacccctcagcaggtggtggccatcgccagcaatggcggcggcaggccggcgctggagagcattgttgcccagttatctcgccctgatccgggatccgacatcaccaaatctaaaatctctgaaaagatgaaaggccagggcccatccggaaataccaaatataacgaagagttcctgctgtacctggccggctttgtggacggtgacggtagcatcgttgctcagattaaaccacatcagtcttgtaagtttaaacatcagctacgtttgacctttaacgtgactcaaaagacccagcgccgttggtttctggacaaactagtggatgaaattggcgttggtcatgtatacgattctggtagcgtttcctactaccagttaagcgaaatcaagccgctgcacaacttcctgactcaactgcagccgtttctggaactgaaacagaaacaggcaaacctggttctgaaaattatcgaacagctgccgtctgcaaaagaatccccggacaaattcctggaagtttgtacctgggtggatcaggttgcagctctgaacgattctaagacgcgtaaaaccacttctgaaacctgtcgtgctgtgctggacagcctgagcgagaagaagaaatcctccccggcggccgactgataactcgagcgatcctctagacgagctcctcgagcctgcagcagctgaagctttggacttcttcgccagaggtttggtcaagtctccaatcaaggttgtcggcttgtctaccttgccagaaatttacgaaaagatggaaaagggtcaaatcgttggtagatacgttgttgacacttctaaataagcgaatttcttatgatttatgatttttattattaaataagttataaaaaaaataagtgtatacaaattttaaagtgactcttaggttttaaaacgaaaattcttattcttgagtaactctttcctgtaggtcaggttgctttctcaggtatagcatgaggtcgctcttattgaccacacctctaccggcatgcaagcttggcgtaatcatggtcatagctgtttcctgtgtgaaattgttatccgctcacaattccacacaacatacgagccggaagcataaagtgtaaagcctggggtgcctaatgagtgagctaactcacattaattgcgttgcgctcactgcccgctttccagtcgggaaacctgtcgtgccagcagatctattacattatgggtggtatgttggaataaaaatcaactatcatctactaactagtatttacgttactagtatattatcatatacggtgttagaagatgacgcaaatgatgagaaatagtcatctaaattagtggaagctgaaacgcaaggattgataatgtaataggatcaatgaatattaacatataaaatgatgataataatatttatagaattgtgtagaattgcagattcccttttatggattcctaaatcctcgaggagaacttctagtatatctacatacctaatattattgccttattaaaaatggaatcccaacaattacatcaaaatccacattctcttcaaaatcaattgtcctgtacttccttgttcatgtgtgttcaaaaacgttatatttataggataattatactctatttctcaacaagtaattggttgtttggccgagcggtctaaggcgcctgattcaagaaatatcttgaccgcagttaactgtgggaatactcaggtatcgtaagatgcaagagttcgaatctcttagcaaccattatttttttcctcaacataacgagaacacacaggggcgctatcgcacagaatcaaattcgatgactggaaattttttgttaatttcagaggtcgcctgacgcatatacctttttcaactgaaaaattgggagaaaaaggaaaggtgagagccgcggaaccggcttttcatatagaatagagaagcgttcatgactaaatgcttgcatcacaatacttgaagttgacaatattatttaaggacctattgttttttccaataggtggttagcaatcgtcttactttctaacttttcttaccttttacatttcagcaatatatatatatatatttcaaggatataccattctaatgtctgcccctaagaagatcgtcgttttgccaggtgaccacgttggtcaagaaatcacagccgaagccattaaggttcttaaagctatttctgatgttcgttccaatgtcaagttcgatttcgaaaatcatttaattggtggtgctgctatcgatgctacaggtgtcccacttccagatgaggcgctggaagcctccaagaaggttgatgccgttttgttaggtgctgtgggtggtcctaaatggggtaccggtagtgttagacctgaacaaggtttactaaaaatccgtaaagaacttcaattgtacgccaacttaagaccatgtaactttgcatccgactctcttttagacttatctccaatcaagccacaatttgctaaaggtactgacttcgttgttgtcagagaattagtgggaggtatttactttggtaagagaaaggaagacgatggtgatggtgtcgcttgggatagtgaacaatacaccgttccagaagtgcaaagaatcacaagaatggccgctttcatggccctacaacatgagccaccattgcctatttggtccttggataaagctaatgttttggcctcttcaagattatggagaaaaactgtggaggaaaccatcaagaacgaattccctacattgaaggttcaacatcaattgattgattctgccgccatgatcctagttaagaacccaacccacctaaatggtattataatcaccagcaacatgtttggtgatatcatctccgatgaagcctccgttatcccaggttccttgggtttgttgccatctgcgtccttggcctctttgccagacaagaacaccgcatttggtttgtacgaaccatgccacggttctgctccagatttgccaaagaataaggtcaaccctatcgccactatcttgtctgctgcaatgatgttgaaattgtcattgaacttgcctgaagaaggtaaggccattgaagatgcagttaaaaaggttttggatgcaggtatcagaactggtgatttaggtggttccaacagtaccacggaagtcggtgatgctgtcgccgaagaagttaagaaaatccttgcttaaaaagattctctttttttatgatatttgtacataaactttataaatgaaattcataatagaaacgacacgaaattacaaaatggaatatgttcatagggtagacgaaactatatacgcaatctacatacatttatcaagaaggagaaaaaggaggatgtaaaggaatacaggtaagcaaattgatactaatggctcaacgtgataaggaaaaagaattgcactttaacattaatattgacaaggaggagggcaccacacaaaaagttaggtgtaacagaaaatcatgaaactatgattcctaatttatatattggaggattttctctaaaaaaaaaaaaatacaacaaataaaaaacactcaatgacctgaccatttgatggagtttaagtcaataccttcttgaaccatttcccataatggtgaaagttccctcaagaattttactctgtcagaaacggccttaacgacgtagtcgacctcctcttcagtactaaatctaccaataccaaatctgatggaagaatgggctaatgcatcatccttacccagcgcatgtaaaacataagaaggttctagggaagcagatgtacaggctgaacccgaggataatgcgatatcccttagtgccatcaataaagattctccttccacgtaggcgaaagaaacgttaacacaccctggataacgatgatctggagatccgttcaacgtggtatgttcagcggataatagacctttgactaatttatcggatagtcttttgatgtgagcttggtcgttgtcaaattctttcttcatcaatctcgcagcttcaccaaatcccgctaccaatgggggggccaaagtaccagatctgctgcattaatgaatcggccaacgcgcggggagaggcggtttgcgtattgggcgctcttccgcttcctcgctcactgactcgctgcgctcggtcgttcggctgcggcgagcggtatcagcatcgatgaattccacggactatagactatactagtatactccgtctactgtacgatacacttccgctcaggtccttgtcctttaacgaggccttaccactcttttgttactctattgatccagctcagcaaaggcagtgtgatctaagattctatcttcgcgatgtagtaaaactagctagaccgagaaagagactagaaatgcaaaaggcacttctacaatggctgccatcattattatccgatgtgacgctgcagcttctcaatgatattcgaatacgctttgaggagatacagcctaatatccgacaaactgttttacagatttacgatcgtacttgttacccatcattgaattttgaacatccgaacctgggagttttccctgaaacagatagtatatttgaacctgtataataatatatagtctagcgctttacggaagacaatgtatgtatttcggttcctggagaaactattgcatctattgcataggtaatcttgcacgtcgcatccccggttcattttctgcgtttccatcttgcacttcaatagcatatctttgttaacgaagcatctgtgcttcattttgtagaacaaaaatgcaacgcgagagcgctaatttttcaaacaaagaatctgagctgcatttttacagaacagaaatgcaacgcgaaagcgctattttaccaacgaagaatctgtgcttcatttttgtaaaacaaaaatgcaacgcgagagcgctaatttttcaaacaaagaatctgagctgcatttttacagaacagaaatgcaacgcgagagcgctattttaccaacaaagaatctatacttcttttttgttctacaaaaatgcatcccgagagcgctatttttctaacaaagcatcttagattactttttttctcctttgtgcgctctataatgcagtctcttgataactttttgcactgtaggtccgttaaggttagaagaaggctactttggtgtctattttctcttccataaaaaaagcctgactccacttcccgcgtttactgattactagcgaagctgcgggtgcattttttcaagataaaggcatccccgattatattctataccgatgtggattgcgcatactttgtgaacagaaagtgatagcgttgatgattcttcattggtcagaaaattatgaacggtttcttctattttgtctctatatactacgtataggaaatgtttacattttcgtattgttttcgattcactctatgaatagttcttactacaatttttttgtctaaagagtaatactagagataaacataaaaaatgtagaggtcgagtttagatgcaagttcaaggagcgaaaggtggatgggtaggttatatagggatatagcacagagatatatagcaaagagatacttttgagcaatgtttgtggaagcggtattcgcaatattttagtagctcgttacagtccggtgcgtttttggttttttgaaagtgcgtcttcagagcgcttttggttttcaaaagcgctctgaagttcctatactttctagagaataggaacttcggaataggaacttcaaagcgtttccgaaaacgagcgcttccgaaaatgcaacgcgagctgcgcacatacagctcactgttcacgtcgcacctatatctgcgtgttgcctgtatatatatatacatgagaagaacggcatagtgcgtgtttatgcttaaatgcgtacttatatgcgtctatttatgtaggatgaaaggtagtctagtacctcctgtgatattatcccattccatgcggggtatcgtatgcttccttcagcactaccctttagctgttctatatgctgccactcctcaattggattagtctcatccttcaatgctatcatttcctttgatattggatcatatgcatagtaccgagaaactagtgcgaagtagtgatcaggtattgctgttatctgatgagtatacgttgtcctggccacggcagaagcacgcttatcgctccaatttcccacaacattagtcaactccgttaggcccttcattgaaagaaatgaggtcatcaaatgtcttccaatgtgagattttgggccattttttatagcaaagattgaataaggcgcatttttcttcaaagctttattgtacgatctgactaagttatcttttaataattggtattcctgtttattgcttgaagaattgccggtcctatttactcgttttaggactggttcagaattcatcgatgctcactcaaaggtcggtaatacggttatccacagaatcaggggataacgcaggaaagaac

SEQ ID NO: 308 - DNA, 10988 bp, Artificial sequence
  pCLS14894
atgtgagcaaaaggccagcaaaaggccaggaaccgtaaaaaggccgcgttgctggcgtttttccataggctccgcccccctgacgagcatcacaaaaatcgacgctcaagtcagaggtggcgaaacccgacaggactataaagataccaggcgtttccccctggaagctccctcgtgcgctctcctgttccgaccctgccgcttaccggatacctgtccgcctttctcccttcgggaagcgtggcgctttctcatagctcacgctgtaggtatctcagttcggtgtaggtcgttcgctccaagctgggctgtgtgcacgaaccccccgttcagcccgaccgctgcgccttatccggtaactatcgtcttgagtccaacccggtaagacacgacttatcgccactggcagcagccactggtaacaggattagcagagcgaggtatgtaggcggtgctacagagttcttgaagtggtggcctaactacggctacactagaagaacagtatttggtatctgcgctctgctgaagccagttaccttcggaaaaagagttggtagctcttgatccggcaaacaaaccaccgctggtagcggtttttttgtttgcaagcagcagattacgcgcagaaaaaaaggatctcaagaagatcctttgatcttttctacggggtctgacgctcagtggaacgaaaactcacgttaagggattttggtcatgagattatcaaaaaggatcttcacctagatccttttaaattaaaaatgaagttttaaatcaatctaaagtatatatgagtaaacttggtctgacagttaccaatgcttaatcagtgaggcacctatctcagcgatctgtctatttcgttcatccatagttgcctgactccccgtcgtgtagataactacgatacgggagggcttaccatctggccccagtgctgcaatgataccgcgagacccacgctcaccggctccagatttatcagcaataaaccagccagccggaagggccgagcgcagaagtggtcctgcaactttatccgcctccatccagtctattaattgttgccgggaagctagagtaagtagttcgccagttaatagtttgcgcaacgttgttgccattgctacaggcatcgtggtgtcacgctcgtcgtttggtatggcttcattcagctccggttcccaacgatcaaggcgagttacatgatcccccatgttgtgcaaaaaagcggttagctccttcggtcctccgatcgttgtcagaagtaagttggccgcagtgttatcactcatggttatggcagcactgcataattctcttactgtcatgccatccgtaagatgcttttctgtgactggtgagtactcaaccaagtcattctgagaatagtgtatgcggcgaccgagttgctcttgcccggcgtcaatacgggataataccgcgccacatagcagaactttaaaagtgctcatcattggaaaacgttcttcggggcgaaaactctcaaggatcttaccgctgttgagatccagttcgatgtaacccactcgtgcacccaactgatcttcagcatcttttactttcaccagcgtttctgggtgagcaaaaacaggaaggcaaaatgccgcaaaaaagggaataagggcgacacggaaatgttgaatactcatactcttcctttttcaatattattgaagcatttatcagggttattgtctcatgagcggatacatatttgaatgtatttagaaaaataaacaaataggggttccgcgcacatttccccgaaaagtgccacctgacgtcgacggatcgggagatctcccgatcccctatggtgcactctcagtacaatctgctctgatgccgcatagttaagccagtatctgctccctgcttgtgtgttggaggtcgctgagtagtgcgcgagcaaaatttaagctacaacaaggcaaggcttgaccgacaattgcatgaagaatctgcttagggttaggcgttttgcgctgcttcgcgatgtacgggccagatatacgcgttgacattgattattgactagttattaatagtaatcaattacggggtcattagttcatagcccatatatggagttccgcgttacataacttacggtaaatggcccgcctggctgaccgcccaacgacccccgcccattgacgtcaataatgacgtatgttcccatagtaacgccaatagggactttccattgacgtcaatgggtggagtatttacggtaaactgcccacttggcagtacatcaagtgtatcatatgccaagtacgccccctattgacgtcaatgacggtaaatggcccgcctggcattatgcccagtacatgaccttatgggactttcctacttggcagtacatctacgtattagtcatcgctattaccatggtgatgcggttttggcagtacatcaatgggcgtggatagcggtttgactcacggggatttccaagtctccaccccattgacgtcaatgggagtttgttttggcaccaaaatcaacgggactttccaaaatgtcgtaacaactccgccccattgacgcaaatgggcggtaggcgtgtacggtgggaggtctatataagcagagctctctggctaactagagaacccactgcttactggcttatcgaaatgaattcgactcactgttgggagacccaagctggctagttaagctatcacaagtttgtacaaaaaagcaggctggcgcgcccaattcgccctatagtgagtcgtattacgtcgcgctcactggccgtcgttttacaacgtcgtgactgggaaaaccctggcgttacccaacttaatcgccttgcagcacatccccctttcgccagctggcgtaatagcgaagaggcccgcaccgaaacgcccttcccaacagttgcgcagcctgaatggcgaatgggagcgccctgtagcggcgcattaagcgcggcgggtgtggtggttacgcgcagcgtgaccgctacacttgccagcgccctagcgcccgctcctttcgctttcttcccttcctttctcgccacgttcgccggctttccccgtcaagctctaaatcgggggctccctttagggttccgatttagtgctttacggcacctcgaccccaaaaaacttgattagggtgatggttggcctgtagtgggccatagccctgatagacggtttttcgccctttgacgttggagtccacgttctttaatagtggactcttgttccaaactggaacaacactcaaccctatctcggtctattcttttgatttataagggattttgccgatttcggcctattggttaaaaaatgagctgatttaacaaaaatttaacgcgaattttaacaaaatattaacgcttacaatttaggtggcacttttcggggaaatgtgcgcggaacccctatttgtttatttttctaaatacattcaaatatgtatccgctcatgagacaataaccctgataaatgcttcaataatattgaaaaaggaagagtatgagtattcaacatttccgtgtcgcccttattcccttttttgcggcattttgccttcctgtttttgctcacccagaaacgctggtgaaagtaaaagatgctgaagatcagttgggtgcacgagtgggttacatcgaactggatctcaacagcggtaagatccttgagagttttcgccccgaagaacgttttccaatgatgagcacttttaaagttctgctatgtggcgcggtattatcccgtattgacgccgggcaagagcaactcggtcgccgcatacactattctcagaatgacttggttgagtactcaccagtcacagaaaagcatcttacggatggcatgacagtaagagaattatgcagtgctgccataaccatgagtgataacactgcggccaacttacttctgacaacgatcggaggaccgaaggagctaaccgcttttttgcacaacatgggggatcatgtaactcgccttgatcgttgggaaccggagctgaatgaagccataccaaacgacgagcgtgacaccacgatgcctgtagcaatggcaacaacgttgcgcaaactattaactggcgaactacttactctagcttcccggcaacaattaatagactggatggaggcggataaagttgcaggaccacttctgcgctcggcccttccggctggctggtttattgctgataaatctggagccggtgagcgtggttctcgcggtatcattgcagcactggggccagatggtaagccctcccgtatcgtagttatctacacgacggggagtcaggcaactatggatgaacgaaatagacagatcgctgagataggtgcctcactgattaagcattggtaactgtcagaccaagtttactcatatatactttagattgatttaaaacttcatttttaatttaaaaggatctaggtgaagatcctttttgataatctcatgaccaaaatcccttaacgtgagttttcgttccactgagcgtcagaccccgtagaaaagatcaaaggatcttcttgagatcctttttttctgcgcgtaatctgctgcttgcaaacaaaaaaaccaccgctaccagcggtggtttgtttgccggatcaagagctaccaactctttttccgaaggtaactggcttcagcagagcgcagataccaaatactgttcttctagtgtagccgtagttaggccaccacttcaagaactctgtagcaccgcctacatacctcgctctgctaatcctgttaccagtggctgctgccagtggcgataagtcgtgtcttaccgggttggactcaagacgatagttaccggataaggcgcagcggtcgggctgaacggggggttcgtgcacacagcccagcttggagcgaacgacctacaccgaactgagatacctacagcgtgagctatgagaaagcgccacgcttcccgaagggagaaaggcggacaggtatccggtaagcggcagggtcggaacaggagagcgcacgagggagcttccagggggaaacgcctggtatctttatagtcctgtcgggtttcgccacctctgacttgagcgtcgatttttgtgatgctcgtcaggggggcggagcctatggaaaaacgccagcaacgcggcctttttacggttcctggccttttgctggccttttgctcacatggtctttcctgcgttatcccctgattctgtggataaccgtattaccgcctttgagtgagctgataccgctcgccgcagccgaacgaccgagcgcagcgagtcagtgagcgaggaagcggagagcgcccaatacgcaaaccgcctctccccgcgcgttggccgattcattaatgcagctggcacgacaggtttcccgactggaaagcgggcagtgagcgcaacgcaattaatgtgagttagctcactcattaggcaccccaggctttacactttatgcttccggctcgtatgttgtgtggaattgtgagcggataacaatttcacacaggaaacagctatgaccatgattacgccaagcgcgtcaattaaccctcactaaagggaacaaaagctgttaattaagcgcgccacacgcaaacacaaatacacagcggccttgccaccatggtggatctacgcacgctcggctacagccagcagcaacaggagaagatcaaaccgaaggttcgttcgacagtggcgcagcaccacgaggcactggtcggccacgggtttacacacgcgcacatcgttgcgttaagccaacacccggcagcgttagggaccgtcgctgtcaagtatcaggacatgatcgcagcgttgccagaggcgacacacgaagcgatcgttggcgtcggcaaacagtggtccggcgcacgcgctctggaggccttgctcacggtggcgggagagttgagaggtccaccgttacagttggacacaggccaacttctcaagattgcaaaacgtggcggcgtgaccgcagtggaggcagtgcatgcatggcgcaatgcactgacgggtgccccgctcaacttgaccccccagcaggtggtggccatcgccagcaataatggtggcaagcaggcgctggagacggtccagcggctgttgccggtgctgtgccaggcccacggcttgaccccggagcaggtggtggccatcgccagccacgatggcggcaagcaggcgctggagacggtccagcggctgttgccggtgctgtgccaggcccacggcttgaccccccagcaggtggtggccatcgccagcaatggcggtggcaagcaggcgctggagacggtccagcggctgttgccggtgctgtgccaggcccacggcttgaccccccagcaggtggtggccatcgccagcaataatggtggcaagcaggcgctggagacggtccagcggctgttgccggtgctgtgccaggcccacggcttgaccccccagcaggtggtggccatcgccagcaatggcggtggcaagcaggcgctggagacggtccagcggctgttgccggtgctgtgccaggcccacggcttgaccccccagcaggtggtggccatcgccagcaataatggtggcaagcaggcgctggagacggtccagcggctgttgccggtgctgtgccaggcccacggcttgaccccggagcaggtggtggccatcgccagccacgatggcggcaagcaggcgctggagacggtccagcggctgttgccggtgctgtgccaggcccacggcttgaccccccagcaggtggtggccatcgccagcaatggcggtggcaagcaggcgctggagacggtccagcggctgttgccggtgctgtgccaggcccacggcttgaccccccagcaggtggtggccatcgccagcaataatggtggcaagcaggcgctggagacggtccagcggctgttgccggtgctgtgccaggcccacggcttgaccccccagcaggtggtggccatcgccagcaataatggtggcaagcaggcgctggagacggtccagcggctgttgccggtgctgtgccaggcccacggcttgaccccccagcaggtggtggccatcgccagcaatggcggtggcaagcaggcgctggagacggtccagcggctgttgccggtgctgtgccaggcccacggcttgaccccggagcaggtggtggccatcgccagccacgatggcggcaagcaggcgctggagacggtccagcggctgttgccggtgctgtgccaggcccacggcttgaccccggagcaggtggtggccatcgccagcaatattggtggcaagcaggcgctggagacggtgcaggcgctgttgccggtgctgtgccaggcccacggcttgacccctcagcaggtggtggccatcgccagcaatggcggcggcaggccggcgctggagagcattgttgcccagttatctcgccctgatccgggatccgacatcaccaaatctaaaatctctgaaaagatgaaaggccagggcccatccggaaataccaaatataacgaagagttcctgctgtacctggccggctttgtggacggtgacggtagcatcgttgctcagattaaaccacatcagtcttgtaagtttaaacatcagctacgtttgacctttaacgtgactcaaaagacccagcgccgttggtttctggacaaactagtggatgaaattggcgttggtcatgtatacgattctggtagcgtttcctactaccagttaagcgaaatcaagccgctgcacaacttcctgactcaactgcagccgtttctggaactgaaacagaaacaggcaaacctggttctgaaaattatcgaacagctgccgtctgcaaaagaatccccggacaaattcctggaagtttgtacctgggtggatcaggttgcagctctgaacgattctaagacgcgtaaaaccacttctgaaaccgttcgtgctgtgctggacagcctgagcgagaagaagaaatcctccccggcggccggtgattcctctgtttctaattccgagcacattgctcctctgtctctgccttcctctcctccatctgttggttctaacaaaaaattcctgctgtatcttgctggatttgtggattctgatggctccatcattgctcagataaaaccaaatcaatcttacaagttcaaacactacctctccttgaccttttgtgtcactcagaagacacaaagaaggtggttcttggacaaattggttgatcgtattggtgtgggctatgtccaggacagaggctctgtgtcagactaccgtctgtctgaaattaagcctcttcgtaactttctcacccaactgcaacccttcttgaagctcaaacagaagcaagcaaatctggttttgaaaatcatcgagcaactgccatctgccaaggagtcccctgacaagtttcttgaagtgtgtacttgggtggatcaggttgctgccttgaatgactccaagaccagaaaaaccacctctgagactgtgagggcagttctggatagcctctctgagaagaaaaagtcctctccttagtaactcgagcgctagcacccagctttcttgtacaaagtggtgatctagagggcccgcggttcgaaggtaagcctatccctaaccctctcctcggtctcgattctacgcgtaccggttagtaatgagtttaaacgggggaggctaactgaaacacggaaggagacaataccggaaggaacccgcgctatgacggcaataaaaagacagaataaaacgcacgggtgttgggtcgtttgttcataaacgcggggttcggtcccagggctggcactctgtcgataccccaccgagaccccattggggccaatacgcccgcgtttcttccttttccccaccccaccccccaagttcgggtgaaggcccagggctcgcagccaacgtcggggcggcaggccctgccatagcagatctgcgcagctggggctctagggggtatccccacgcgccctgtagcggcgcattaagcgcggcgggtgtggtggttacgcgcagcgtgaccgctacacttgccagcgccctagcgcccgctcctttcgctttcttcccttcctttctcgccacgttcgccggctttccccgtcaagctctaaatcggggcatccctttagggttccgatttagtgctttacggcacctcgaccccaaaaaacttgattagggtgatggttcacgtagtgggccatcgccctgatagacggtttttcgccctttgacgttggagtccacgttctttaatagtggactcttgttccaaactggaacaacactcaaccctatctcggtctattcttttgatttataagggattttggggatttcggcctattggttaaaaaatgagctgatttaacaaaaatttaacgcgaattaattctgtggaatgtgtgtcagttagggtgtggaaagtccccaggctccccagcaggcagaagtatgcaaagcatgcatctcaattagtcagcaaccaggtgtggaaagtccccaggctccccagcaggcagaagtatgcaaagcatgcatctcaattagtcagcaaccatagtcccgcccctaactccgcccatcccgcccctaactccgcccagttccgcccattctccgccccatggctgactaattttttttatttatgcagaggccgaggccgcctctgcctctgagctattccagaagtagtgaggaggcttttttggaggcctaggcttttgcaaaaagctcccgggagcttgtatatccattttcggatctgatcagcacgtgttgacaattaatcatcggcatagtatatcggcatagtataatacgacaaggtgaggaactaaaccatggccaagcctttgtctcaagaagaatccaccctcattgaaagagcaacggctacaatcaacagcatccccatctctgaagactacagcgtcgccagcgcagctctctctagcgacggccgcatcttcactggtgtcaatgtatatcattttactgggggaccttgtgcagaactcgtggtgctgggcactgctgctgctgcggcagctggcaacctgacttgtatcgtcgcgatcggaaatgagaacaggggcatcttgagcccctgcggacggtgccgacaggtgcttctcgatctgcatcctgggatcaaagccatagtgaaggacagtgatggacagccgacggcagttgggattcgtgaattgctgccctctggttatgtgtgggagggctaagcacttcgtggccgaggagcaggactgacacgtgctacgagatttcgattccaccgccgccttctatgaaaggttgggcttcggaatcgttttccgggacgccggctggatgatcctccagcgcggggatctcatgctggagttcttcgcccaccccaacttgtttattgcagcttataatggttacaaataaagcaatagcatcacaaatttcacaaataaagcatttttttcactgcattctagttgtggtttgtccaaactcatcaatgtatcttatcatgtctgtataccgtcgacctctagctagagcttggcgtaatcatggtcatagctgtttcctgtgtgaaattgttatccgctcacaattccacacaacatacgagccggaagcataaagtgtaaagcctggggtgcctaatgagtgagctaactcacattaattgcgttgcgctcactgcccgctttccagtcgggaaacctgtcgtgccagctgcattaatgaatcggccaacgcgcggggagaggcggtttgcgtattgggcgctcttccgcttcctcgctcactgactcgctgcgctcggtcgttcggctgcggcgagcggtatcagctcactcaaaggcggtaatacggttatccacagaatcaggggataacgcaggaaagaac

SEQ ID NO: 309 - DNA, 10988 bp, Artificial sequence
  pCLS14895
atgtgagcaaaaggccagcaaaaggccaggaaccgtaaaaaggccgcgttgctggcgtttttccataggctccgcccccctgacgagcatcacaaaaatcgacgctcaagtcagaggtggcgaaacccgacaggactataaagataccaggcgtttccccctggaagctccctcgtgcgctctcctgttccgaccctgccgcttaccggatacctgtccgcctttctcccttcgggaagcgtggcgctttctcatagctcacgctgtaggtatctcagttcggtgtaggtcgttcgctccaagctgggctgtgtgcacgaaccccccgttcagcccgaccgctgcgccttatccggtaactatcgtcttgagtccaacccggtaagacacgacttatcgccactggcagcagccactggtaacaggattagcagagcgaggtatgtaggcggtgctacagagttcttgaagtggtggcctaactacggctacactagaagaacagtatttggtatctgcgctctgctgaagccagttaccttcggaaaaagagttggtagctcttgatccggcaaacaaaccaccgctggtagcggtttttttgtttgcaagcagcagattacgcgcagaaaaaaaggatctcaagaagatcctttgatcttttctacggggtctgacgctcagtggaacgaaaactcacgttaagggattttggtcatgagattatcaaaaaggatcttcacctagatccttttaaattaaaaatgaagttttaaatcaatctaaagtatatatgagtaaacttggtctgacagttaccaatgcttaatcagtgaggcacctatctcagcgatctgtctatttcgttcatccatagttgcctgactccccgtcgtgtagataactacgatacgggagggcttaccatctggccccagtgctgcaatgataccgcgagacccacgctcaccggctccagatttatcagcaataaaccagccagccggaagggccgagcgcagaagtggtcctgcaactttatccgcctccatccagtctattaattgttgccgggaagctagagtaagtagttcgccagttaatagtttgcgcaacgttgttgccattgctacaggcatcgtggtgtcacgctcgtcgtttggtatggcttcattcagctccggttcccaacgatcaaggcgagttacatgatcccccatgttgtgcaaaaaagcggttagctccttcggtcctccgatcgttgtcagaagtaagttggccgcagtgttatcactcatggttatggcagcactgcataattctcttactgtcatgccatccgtaagatgcttttctgtgactggtgagtactcaaccaagtcattctgagaatagtgtatgcggcgaccgagttgctcttgcccggcgtcaatacgggataataccgcgccacatagcagaactttaaaagtgctcatcattggaaaacgttcttcggggcgaaaactctcaaggatcttaccgctgttgagatccagttcgatgtaacccactcgtgcacccaactgatcttcagcatcttttactttcaccagcgtttctgggtgagcaaaaacaggaaggcaaaatgccgcaaaaaagggaataagggcgacacggaaatgttgaatactcatactcttcctttttcaatattattgaagcatttatcagggttattgtctcatgagcggatacatatttgaatgtatttagaaaaataaacaaataggggttccgcgcacatttccccgaaaagtgccacctgacgtcgacggatcgggagatctcccgatcccctatggtgcactctcagtacaatctgctctgatgccgcatagttaagccagtatctgctccctgcttgtgtgttggaggtcgctgagtagtgcgcgagcaaaatttaagctacaacaaggcaaggcttgaccgacaattgcatgaagaatctgcttagggttaggcgttttgcgctgcttcgcgatgtacgggccagatatacgcgttgacattgattattgactagttattaatagtaatcaattacggggtcattagttcatagcccatatatggagttccgcgttacataacttacggtaaatggcccgcctggctgaccgcccaacgacccccgcccattgacgtcaataatgacgtatgttcccatagtaacgccaatagggactttccattgacgtcaatgggtggagtatttacggtaaactgcccacttggcagtacatcaagtgtatcatatgccaagtacgccccctattgacgtcaatgacggtaaatggcccgcctggcattatgcccagtacatgaccttatgggactttcctacttggcagtacatctacgtattagtcatcgctattaccatggtgatgcggttttggcagtacatcaatgggcgtggatagcggtttgactcacggggatttccaagtctccaccccattgacgtcaatgggagtttgttttggcaccaaaatcaacgggactttccaaaatgtcgtaacaactccgccccattgacgcaaatgggcggtaggcgtgtacggtgggaggtctatataagcagagctctctggctaactagagaacccactgcttactggcttatcgaaatgaattcgactcactgttgggagacccaagctggctagttaagctatcacaagtttgtacaaaaaagcaggctggcgcgcccaattcgccctatagtgagtcgtattacgtcgcgctcactggccgtcgttttacaacgtcgtgactgggaaaaccctggcgttacccaacttaatcgccttgcagcacatccccctttcgccagctggcgtaatagcgaagaggcccgcaccgaaacgcccttcccaacagttgcgcagcctgaatggcgaatgggagcgccctgtagcggcgcattaagcgcggcgggtgtggtggttacgcgcagcgtgaccgctacacttgccagcgccctagcgcccgctcctttcgctttcttcccttcctttctcgccacgttcgccggctttccccgtcaagctctaaatcgggggctccctttagggttccgatttagtgctttacggcacctcgaccccaaaaaacttgattagggtgatggttggcctgtagtgggccatagccctgatagacggtttttcgccctttgacgttggagtccacgttctttaatagtggactcttgttccaaactggaacaacactcaaccctatctcggtctattcttttgatttataagggattttgccgatttcggcctattggttaaaaaatgagctgatttaacaaaaatttaacgcgaattttaacaaaatattaacgcttacaatttaggtggcacttttcggggaaatgtgcgcggaacccctatttgtttatttttctaaatacattcaaatatgtatccgctcatgagacaataaccctgataaatgcttcaataatattgaaaaaggaagagtatgagtattcaacatttccgtgtcgcccttattcccttttttgcggcattttgccttcctgtttttgctcacccagaaacgctggtgaaagtaaaagatgctgaagatcagttgggtgcacgagtgggttacatcgaactggatctcaacagcggtaagatccttgagagttttcgccccgaagaacgttttccaatgatgagcacttttaaagttctgctatgtggcgcggtattatcccgtattgacgccgggcaagagcaactcggtcgccgcatacactattctcagaatgacttggttgagtactcaccagtcacagaaaagcatcttacggatggcatgacagtaagagaattatgcagtgctgccataaccatgagtgataacactgcggccaacttacttctgacaacgatcggaggaccgaaggagctaaccgcttttttgcacaacatgggggatcatgtaactcgccttgatcgttgggaaccggagctgaatgaagccataccaaacgacgagcgtgacaccacgatgcctgtagcaatggcaacaacgttgcgcaaactattaactggcgaactacttactctagcttcccggcaacaattaatagactggatggaggcggataaagttgcaggaccacttctgcgctcggcccttccggctggctggtttattgctgataaatctggagccggtgagcgtggttctcgcggtatcattgcagcactggggccagatggtaagccctcccgtatcgtagttatctacacgacggggagtcaggcaactatggatgaacgaaatagacagatcgctgagataggtgcctcactgattaagcattggtaactgtcagaccaagtttactcatatatactttagattgatttaaaacttcatttttaatttaaaaggatctaggtgaagatcctttttgataatctcatgaccaaaatcccttaacgtgagttttcgttccactgagcgtcagaccccgtagaaaagatcaaaggatcttcttgagatcctttttttctgcgcgtaatctgctgcttgcaaacaaaaaaaccaccgctaccagcggtggtttgtttgccggatcaagagctaccaactctttttccgaaggtaactggcttcagcagagcgcagataccaaatactgttcttctagtgtagccgtagttaggccaccacttcaagaactctgtagcaccgcctacatacctcgctctgctaatcctgttaccagtggctgctgccagtggcgataagtcgtgtcttaccgggttggactcaagacgatagttaccggataaggcgcagcggtcgggctgaacggggggttcgtgcacacagcccagcttggagcgaacgacctacaccgaactgagatacctacagcgtgagctatgagaaagcgccacgcttcccgaagggagaaaggcggacaggtatccggtaagcggcagggtcggaacaggagagcgcacgagggagcttccagggggaaacgcctggtatctttatagtcctgtcgggtttcgccacctctgacttgagcgtcgatttttgtgatgctcgtcaggggggcggagcctatggaaaaacgccagcaacgcggcctttttacggttcctggccttttgctggccttttgctcacatggtctttcctgcgttatcccctgattctgtggataaccgtattaccgcctttgagtgagctgataccgctcgccgcagccgaacgaccgagcgcagcgagtcagtgagcgaggaagcggagagcgcccaatacgcaaaccgcctctccccgcgcgttggccgattcattaatgcagctggcacgacaggtttcccgactggaaagcgggcagtgagcgcaacgcaattaatgtgagttagctcactcattaggcaccccaggctttacactttatgcttccggctcgtatgttgtgtggaattgtgagcggataacaatttcacacaggaaacagctatgaccatgattacgccaagcgcgtcaattaaccctcactaaagggaacaaaagctgttaattaagcgcgccacacgcaaacacaaatacacagcggccttgccaccatggtggatctacgcacgctcggctacagccagcagcaacaggagaagatcaaaccgaaggttcgttcgacagtggcgcagcaccacgaggcactggtcggccacgggtttacacacgcgcacatcgttgcgttaagccaacacccggcagcgttagggaccgtcgctgtcaagtatcaggacatgatcgcagcgttgccagaggcgacacacgaagcgatcgttggcgtcggcaaacagtggtccggcgcacgcgctctggaggccttgctcacggtggcgggagagttgagaggtccaccgttacagttggacacaggccaacttctcaagattgcaaaacgtggcggcgtgaccgcagtggaggcagtgcatgcatggcgcaatgcactgacgggtgccccgctcaacttgaccccccagcaggtggtggccatcgccagcaataatggtggcaagcaggcgctggagacggtccagcggctgttgccggtgctgtgccaggcccacggcttgaccccccagcaggtggtggccatcgccagcaatggcggtggcaagcaggcgctggagacggtccagcggctgttgccggtgctgtgccaggcccacggcttgaccccggagcaggtggtggccatcgccagcaatattggtggcaagcaggcgctggagacggtgcaggcgctgttgccggtgctgtgccaggcccacggcttgaccccccagcaggtggtggccatcgccagcaatggcggtggcaagcaggcgctggagacggtccagcggctgttgccggtgctgtgccaggcccacggcttgaccccccagcaggtggtggccatcgccagcaataatggtggcaagcaggcgctggagacggtccagcggctgttgccggtgctgtgccaggcccacggcttgaccccggagcaggtggtggccatcgccagccacgatggcggcaagcaggcgctggagacggtccagcggctgttgccggtgctgtgccaggcccacggcttgaccccccagcaggtggtggccatcgccagcaatggcggtggcaagcaggcgctggagacggtccagcggctgttgccggtgctgtgccaggcccacggcttgaccccccagcaggtggtggccatcgccagcaataatggtggcaagcaggcgctggagacggtccagcggctgttgccggtgctgtgccaggcccacggcttgaccccccagcaggtggtggccatcgccagcaatggcggtggcaagcaggcgctggagacggtccagcggctgttgccggtgctgtgccaggcccacggcttgaccccccagcaggtggtggccatcgccagcaataatggtggcaagcaggcgctggagacggtccagcggctgttgccggtgctgtgccaggcccacggcttgaccccggagcaggtggtggccatcgccagccacgatggcggcaagcaggcgctggagacggtccagcggctgttgccggtgctgtgccaggcccacggcttgaccccccagcaggtggtggccatcgccagcaatggcggtggcaagcaggcgctggagacggtccagcggctgttgccggtgctgtgccaggcccacggcttgaccccccagcaggtggtggccatcgccagcaataatggtggcaagcaggcgctggagacggtccagcggctgttgccggtgctgtgccaggcccacggcttgacccctcagcaggtggtggccatcgccagcaatggcggcggcaggccggcgctggagagcattgttgcccagttatctcgccctgatccgggatccgacatcaccaaatctaaaatctctgaaaagatgaaaggccagggcccatccggaaataccaaatataacgaagagttcctgctgtacctggccggctttgtggacggtgacggtagcatcgttgctcagattaaaccacatcagtcttgtaagtttaaacatcagctacgtttgacctttaacgtgactcaaaagacccagcgccgttggtttctggacaaactagtggatgaaattggcgttggtcatgtatacgattctggtagcgtttcctactaccagttaagcgaaatcaagccgctgcacaacttcctgactcaactgcagccgtttctggaactgaaacagaaacaggcaaacctggttctgaaaattatcgaacagctgccgtctgcaaaagaatccccggacaaattcctggaagtttgtacctgggtggatcaggttgcagctctgaacgattctaagacgcgtaaaaccacttctgaaaccgttcgtgctgtgctggacagcctgagcgagaagaagaaatcctccccggcggccggtgattcctctgtttctaattccgagcacattgctcctctgtctctgccttcctctcctccatctgttggttctaacaaaaaattcctgctgtatcttgctggatttgtggattctgatggctccatcattgctcagataaaaccaaatcaatcttacaagttcaaacactacctctccttgaccttttgtgtcactcagaagacacaaagaaggtggttcttggacaaattggttgatcgtattggtgtgggctatgtccaggacagaggctctgtgtcagactaccgtctgtctgaaattaagcctcttcgtaactttctcacccaactgcaacccttcttgaagctcaaacagaagcaagcaaatctggttttgaaaatcatcgagcaactgccatctgccaaggagtcccctgacaagtttcttgaagtgtgtacttgggtggatcaggttgctgccttgaatgactccaagaccagaaaaaccacctctgagactgtgagggcagttctggatagcctctctgagaagaaaaagtcctctccttagtaactcgagcgctagcacccagctttcttgtacaaagtggtgatctagagggcccgcggttcgaaggtaagcctatccctaaccctctcctcggtctcgattctacgcgtaccggttagtaatgagtttaaacgggggaggctaactgaaacacggaaggagacaataccggaaggaacccgcgctatgacggcaataaaaagacagaataaaacgcacgggtgttgggtcgtttgttcataaacgcggggttcggtcccagggctggcactctgtcgataccccaccgagaccccattggggccaatacgcccgcgtttcttccttttccccaccccaccccccaagttcgggtgaaggcccagggctcgcagccaacgtcggggcggcaggccctgccatagcagatctgcgcagctggggctctagggggtatccccacgcgccctgtagcggcgcattaagcgcggcgggtgtggtggttacgcgcagcgtgaccgctacacttgccagcgccctagcgcccgctcctttcgctttcttcccttcctttctcgccacgttcgccggctttccccgtcaagctctaaatcggggcatccctttagggttccgatttagtgctttacggcacctcgaccccaaaaaacttgattagggtgatggttcacgtagtgggccatcgccctgatagacggtttttcgccctttgacgttggagtccacgttctttaatagtggactcttgttccaaactggaacaacactcaaccctatctcggtctattcttttgatttataagggattttggggatttcggcctattggttaaaaaatgagctgatttaacaaaaatttaacgcgaattaattctgtggaatgtgtgtcagttagggtgtggaaagtccccaggctccccagcaggcagaagtatgcaaagcatgcatctcaattagtcagcaaccaggtgtggaaagtccccaggctccccagcaggcagaagtatgcaaagcatgcatctcaattagtcagcaaccatagtcccgcccctaactccgcccatcccgcccctaactccgcccagttccgcccattctccgccccatggctgactaattttttttatttatgcagaggccgaggccgcctctgcctctgagctattccagaagtagtgaggaggcttttttggaggcctaggcttttgcaaaaagctcccgggagcttgtatatccattttcggatctgatcagcacgtgttgacaattaatcatcggcatagtatatcggcatagtataatacgacaaggtgaggaactaaaccatggccaagcctttgtctcaagaagaatccaccctcattgaaagagcaacggctacaatcaacagcatccccatctctgaagactacagcgtcgccagcgcagctctctctagcgacggccgcatcttcactggtgtcaatgtatatcattttactgggggaccttgtgcagaactcgtggtgctgggcactgctgctgctgcggcagctggcaacctgacttgtatcgtcgcgatcggaaatgagaacaggggcatcttgagcccctgcggacggtgccgacaggtgcttctcgatctgcatcctgggatcaaagccatagtgaaggacagtgatggacagccgacggcagttgggattcgtgaattgctgccctctggttatgtgtgggagggctaagcacttcgtggccgaggagcaggactgacacgtgctacgagatttcgattccaccgccgccttctatgaaaggttgggcttcggaatcgttttccgggacgccggctggatgatcctccagcgcggggatctcatgctggagttcttcgcccaccccaacttgtttattgcagcttataatggttacaaataaagcaatagcatcacaaatttcacaaataaagcatttttttcactgcattctagttgtggtttgtccaaactcatcaatgtatcttatcatgtctgtataccgtcgacctctagctagagcttggcgtaatcatggtcatagctgtttcctgtgtgaaattgttatccgctcacaattccacacaacatacgagccggaagcataaagtgtaaagcctggggtgcctaatgagtgagctaactcacattaattgcgttgcgctcactgcccgctttccagtcgggaaacctgtcgtgccagctgcattaatgaatcggccaacgcgcggggagaggcggtttgcgtattgggcgctcttccgcttcctcgctcactgactcgctgcgctcggtcgttcggctgcggcgagcggtatcagctcactcaaaggcggtaatacggttatccacagaatcaggggataacgcaggaaagaac

SEQ ID NO: 310 - DNA, 6626 bp, Artificial sequence
  pCLS8982
atgtgagcaaaaggccagcaaaaggccaggaaccgtaaaaaggccgcgttgctggcgtttttccataggctccgcccccctgacgagcatcacaaaaatcgacgctcaagtcagaggtggcgaaacccgacaggactataaagataccaggcgtttccccctggaagctccctcgtgcgctctcctgttccgaccctgccgcttaccggatacctgtccgcctttctcccttcgggaagcgtggcgctttctcatagctcacgctgtaggtatctcagttcggtgtaggtcgttcgctccaagctgggctgtgtgcacgaaccccccgttcagcccgaccgctgcgccttatccggtaactatcgtcttgagtccaacccggtaagacacgacttatcgccactggcagcagccactggtaacaggattagcagagcgaggtatgtaggcggtgctacagagttcttgaagtggtggcctaactacggctacactagaagaacagtatttggtatctgcgctctgctgaagccagttaccttcggaaaaagagttggtagctcttgatccggcaaacaaaccaccgctggtagcggtttttttgtttgcaagcagcagattacgcgcagaaaaaaaggatctcaagaagatcctttgatcttttctacggggtctgacgctcagtggaacgaaaactcacgttaagggattttggtcatgagattatcaaaaaggatcttcacctagatccttttaaattaaaaatgaagttttaaatcaatctaaagtatatatgagtaaacttggtctgacagttaccaatgcttaatcagtgaggcacctatctcagcgatctgtctatttcgttcatccatagttgcctgactccccgtcgtgtagataactacgatacgggagggcttaccatctggccccagtgctgcaatgataccgcgagacccacgctcaccggctccagatttatcagcaataaaccagccagccggaagggccgagcgcagaagtggtcctgcaactttatccgcctccatccagtctattaattgttgccgggaagctagagtaagtagttcgccagttaatagtttgcgcaacgttgttgccattgctacaggcatcgtggtgtcacgctcgtcgtttggtatggcttcattcagctccggttcccaacgatcaaggcgagttacatgatcccccatgttgtgcaaaaaagcggttagctccttcggtcctccgatcgttgtcagaagtaagttggccgcagtgttatcactcatggttatggcagcactgcataattctcttactgtcatgccatccgtaagatgcttttctgtgactggtgagtactcaaccaagtcattctgagaatagtgtatgcggcgaccgagttgctcttgcccggcgtcaatacgggataataccgcgccacatagcagaactttaaaagtgctcatcattggaaaacgttcttcggggcgaaaactctcaaggatcttaccgctgttgagatccagttcgatgtaacccactcgtgcacccaactgatcttcagcatcttttactttcaccagcgtttctgggtgagcaaaaacaggaaggcaaaatgccgcaaaaaagggaataagggcgacacggaaatgttgaatactcatactcttcctttttcaatattattgaagcatttatcagggttattgtctcatgagcggatacatatttgaatgtatttagaaaaataaacaaataggggttccgcgcacatttccccgaaaagtgccacctgacgtcgacggatcgggagatctcccgatcccctatggtgcactctcagtacaatctgctctgatgccgcatagttaagccagtatctgctccctgcttgtgtgttggaggtcgctgagtagtgcgcgagcaaaatttaagctacaacaaggcaaggcttgaccgacaattgcatgaagaatctgcttagggttaggcgttttgcgctgcttcgcgatgtacgggccagatatacgcgttgacattgattattgactagttattaatagtaatcaattacggggtcattagttcatagcccatatatggagttccgcgttacataacttacggtaaatggcccgcctggctgaccgcccaacgacccccgcccattgacgtcaataatgacgtatgttcccatagtaacgccaatagggactttccattgacgtcaatgggtggagtatttacggtaaactgcccacttggcagtacatcaagtgtatcatatgccaagtacgccccctattgacgtcaatgacggtaaatggcccgcctggcattatgcccagtacatgaccttatgggactttcctacttggcagtacatctacgtattagtcatcgctattaccatggtgatgcggttttggcagtacatcaatgggcgtggatagcggtttgactcacggggatttccaagtctccaccccattgacgtcaatgggagtttgttttggcaccaaaatcaacgggactttccaaaatgtcgtaacaactccgccccattgacgcaaatgggcggtaggcgtgtacggtgggaggtctatataagcagagctctctggctaactagagaacccactgcttactggcttatcgaaatgaattcgactcactgttgggagacccaagctggctagttaagctatcacaagtttgtacaaaaaagcaggctggcgcgcctacacagcggccttgccaccatgggttccgaggcaccccgggccgagacctttgtcttcctggacctggaagccactgggctccccagtgtggagcccgagattgccgagctgtccctctttgctgtccaccgctcctccctggagaacccggagcacgacgagtctggtgccctagtattgccccgggtcctggacaagctcacgctgtgcatgtgcccggagcgccccttcactgccaaggccagcgagatcaccggcctgagcagtgagggcctggcgcgatgccggaaggctggctttgatggcgccgtggtgcggacgctgcaggccttcctgagccgccaggcagggcccatctgccttgtggcccacaatggctttgattatgatttccccctgctgtgtgccgagctgcggcgcctgggtgcccgcctgccccgggacactgtctgcctggacacgctgccggccctgcggggcctggaccgcgcccacagccacggcacccgggcccggggccgccagggttacagcctcggcagcctcttccaccgctacttccgggcagagccaagcgcagcccactcagccgagggcgacgtgcacaccctgctcctgatcttcctgcaccgcgccgcagagctgctcgcctgggccgatgagcaggcccgtgggtgggcccacatcgagcccatgtacttgccgcctgatgaccccagcctggaggcgactcctccacagaccggtctggatgttccttactccgaggcaccccgggccgagacctttgtcttcctggacctggaagccactgggctccccagtgtggagcccgagattgccgagctgtccctctttgctgtccaccgctcctccctggagaacccggagcacgacgagtctggtgccctagtattgccccgggtcctggacaagctcacgctgtgcatgtgcccggagcgccccttcactgccaaggccagcgagatcaccggcctgagcagtgagggcctggcgcgatgccggaaggctggctttgatggcgccgtggtgcggacgctgcaggccttcctgagccgccaggcagggcccatctgccttgtggcccacaatggctttgattatgatttccccctgctgtgtgccgagctgcggcgcctgggtgcccgcctgccccgggacactgtctgcctggacacgctgccggccctgcggggcctggaccgcgcccacagccacggcacccgggcccggggccgccagggttacagcctcggcagcctcttccaccgctacttccgggcagagccaagcgcagcccactcagccgagggcgacgtgcacaccctgctcctgatcttcctgcaccgcgccgcagagctgctcgcctgggccgatgagcaggcccgtgggtgggcccacatcgagcccatgtacttgccgcctgatgaccccagcctggaggcggccgactgataactcgagcgctagcacccagctttcttgtacaaagtggtgatctagagggcccgcggttcgaaggtaagcctatccctaaccctctcctcggtctcgattctacgcgtaccggttagtaatgagtttaaacgggggaggctaactgaaacacggaaggagacaataccggaaggaacccgcgctatgacggcaataaaaagacagaataaaacgcacgggtgttgggtcgtttgttcataaacgcggggttcggtcccagggctggcactctgtcgataccccaccgagaccccattggggccaatacgcccgcgtttcttccttttccccaccccaccccccaagttcgggtgaaggcccagggctcgcagccaacgtcggggcggcaggccctgccatagcagatctgcgcagctggggctctagggggtatccccacgcgccctgtagcggcgcattaagcgcggcgggtgtggtggttacgcgcagcgtgaccgctacacttgccagcgccctagcgcccgctcctttcgctttcttcccttcctttctcgccacgttcgccggctttccccgtcaagctctaaatcggggcatccctttagggttccgatttagtgctttacggcacctcgaccccaaaaaacttgattagggtgatggttcacgtagtgggccatcgccctgatagacggtttttcgccctttgacgttggagtccacgttctttaatagtggactcttgttccaaactggaacaacactcaaccctatctcggtctattcttttgatttataagggattttggggatttcggcctattggttaaaaaatgagctgatttaacaaaaatttaacgcgaattaattctgtggaatgtgtgtcagttagggtgtggaaagtccccaggctccccagcaggcagaagtatgcaaagcatgcatctcaattagtcagcaaccaggtgtggaaagtccccaggctccccagcaggcagaagtatgcaaagcatgcatctcaattagtcagcaaccatagtcccgcccctaactccgcccatcccgcccctaactccgcccagttccgcccattctccgccccatggctgactaattttttttatttatgcagaggccgaggccgcctctgcctctgagctattccagaagtagtgaggaggcttttttggaggcctaggcttttgcaaaaagctcccgggagcttgtatatccattttcggatctgatcagcacgtgttgacaattaatcatcggcatagtatatcggcatagtataatacgacaaggtgaggaactaaaccatggccaagcctttgtctcaagaagaatccaccctcattgaaagagcaacggctacaatcaacagcatccccatctctgaagactacagcgtcgccagcgcagctctctctagcgacggccgcatcttcactggtgtcaatgtatatcattttactgggggaccttgtgcagaactcgtggtgctgggcactgctgctgctgcggcagctggcaacctgacttgtatcgtcgcgatcggaaatgagaacaggggcatcttgagcccctgcggacggtgccgacaggtgcttctcgatctgcatcctgggatcaaagccatagtgaaggacagtgatggacagccgacggcagttgggattcgtgaattgctgccctctggttatgtgtgggagggctaagcacttcgtggccgaggagcaggactgacacgtgctacgagatttcgattccaccgccgccttctatgaaaggttgggcttcggaatcgttttccgggacgccggctggatgatcctccagcgcggggatctcatgctggagttcttcgcccaccccaacttgtttattgcagcttataatggttacaaataaagcaatagcatcacaaatttcacaaataaagcatttttttcactgcattctagttgtggtttgtccaaactcatcaatgtatcttatcatgtctgtataccgtcgacctctagctagagcttggcgtaatcatggtcatagctgtttcctgtgtgaaattgttatccgctcacaattccacacaacatacgagccggaagcataaagtgtaaagcctggggtgcctaatgagtgagctaactcacattaattgcgttgcgctcactgcccgctttccagtcgggaaacctgtcgtgccagctgcattaatgaatcggccaacgcgcggggagaggcggtttgcgtattgggcgctcttccgcttcctcgctcactgactcgctgcgctcggtcgttcggctgcggcgagcggtatcagctcactcaaaggcggtaatacggttatccacagaatcaggggataacgcaggaaagaac

SEQ ID NO: 311 - DNA, 23 bp, Artificial sequence
  TRBC2F3 oligonucleotide
gtgggagagaccagagctacctg

SEQ ID NO: 312 - DNA, 24 bp, Artificial sequence
  TRBC2R3B oligonucleotide
ccttactatttgtgtggtcaatgg

SEQ ID NO: 313 - DNA, 22 bp, Artificial sequence
  TRBC2F4 oligonucleotide
aggtacccacctgtccttcctc

SEQ ID NO: 314 - DNA, 23 bp, Artificial sequence
  TRBC2R4B oligonucleotide
atggatgttgtgatgagccttac

SEQ ID NO: 315 - DNA, 41 bp, Artificial sequence
  hybrid RagT2-R/AvrBs5
tgtttatggttacttataggtatatataaacctaaccctct

SEQ ID NO: 316 - DNA, 42 bp, Artificial sequence
  hybrid RagT2-R/AvrBs6
tgtttatggttacttataaggtatatataaacctaaccctct

SEQ ID NO: 317 - DNA, 43 bp, Artificial sequence
  hybrid RagT2-R/AvrBs7
tgtttatggttacttataaggtactatataaacctaaccctct

SEQ ID NO: 318 - DNA, 44 bp, Artificial sequence
  hybrid RagT2-R/AvrBs8
tgtttatggttacttatgaaggtactatataaacctaaccctct

SEQ ID NO: 319 - DNA, 45 bp, Artificial sequence
  hybrid RagT2-R/AvrBs9
tgtttatggttacttatgaaggtacctatataaacctaaccctct

SEQ ID NO: 320 - DNA, 46 bp, Artificial sequence
  hybrid RagT2-R/AvrBs10
tgtttatggttacttattgaaggtacctatataaacctaaccctct

SEQ ID NO: 321 - DNA, 47 bp, Artificial sequence
  hybrid RagT2-R/AvrBs11
tgtttatggttacttattgaaggtaccttatataaacctaaccctct

SEQ ID NO: 322 - DNA, 48 bp, Artificial sequence
  hybrid RagT2-R/AvrBs12
tgtttatggttacttatatgaaggtaccttatataaacctaaccctct

SEQ ID NO: 323 - DNA, 49 bp, Artificial sequence
  hybrid RagT2-R/AvrBs13
tgtttatggttacttatatgaaggtacctttatataaacctaaccctct

SEQ ID NO: 324 - DNA, 50 bp, Artificial sequence
  hybrid RagT2-R/AvrBs14
tgtttatggttacttatcatgaaggtacctttatataaacctaaccctct

SEQ ID NO: 325 - DNA, 51 bp, Artificial sequence
  hybrid RagT2-R/AvrBs15
tgtttatggttacttattagcatgaaggtacctatataaacctaaccctct

SEQ ID NO: 326 - DNA, 52 bp, Artificial sequence
  hybrid RagT2-R/AvrBs16
tgtttatggttacttatgcatgaaggtaccttgtatataaacctaaccctct

SEQ ID NO: 327 - DNA, 53 bp, Artificial sequence
  hybrid RagT2-R/AvrBs17
tgtttatggttacttatgcatgaaggtaccttgttatataaacctaaccctct

SEQ ID NO: 328 - DNA, 54 bp, Artificial sequence
  hybrid RagT2-R/AvrBs18
tgtttatggttacttatagcatgaaggtaccttgttatataaacctaaccctct

SEQ ID NO: 329 - DNA, 55 bp, Artificial sequence
  hybrid RagT2-R/AvrBs19
tgtttatggttacttatagcatgaaggtaccttgtctatataaacctaaccctct

SEQ ID NO: 330 - DNA, 56 bp, Artificial sequence
  hybrid RagT2-R/AvrBs20
tgtttatggttacttattagcatgaaggtaccttgtctatataaacctaaccctct

SEQ ID NO: 331 - DNA, 57 bp, Artificial sequence
  hybrid RagT2-R/AvrBs21
tgtttatggttacttattagcatgaaggtaccttgtcgtatataaacctaaccctct

SEQ ID NO: 332 - DNA, 58 bp, Artificial sequence
  hybrid RagT2-R/AvrBs22
tgtttatggttacttattagcatgaaggtaccttgtcgttatataaacctaaccctct

SEQ ID NO: 333 - DNA, 59 bp, Artificial sequence
  hybrid RagT2-R/AvrBs23
tgtttatggttacttatctagcatgaaggtaccttgtcgttatataaacctaaccctct

SEQ ID NO: 334 - DNA, 60 bp, Artificial sequence
  hybrid RagT2-R/AvrBs24
tgtttatggttacttatctagcatgaaggtaccttgtcgtttatataaacctaaccctct

SEQ ID NO: 335 - DNA, 61 bp, Artificial sequence
  hybrid RagT2-R/AvrBs25
tgtttatggttacttatactagcatgaaggtaccttgtcgtttatataaacctaaccctct

SEQ ID NO: 336 - DNA, 62 bp, Artificial sequence
  hybrid RagT2-R/AvrBs26
tgtttatggttacttatactagcatgaaggtaccttgtcgttgtatataaacctaaccctct

SEQ ID NO: 337 - DNA, 63 bp, Artificial sequence
  hybrid RagT2-R/AvrBs27
tgtttatggttacttatcactagcatgaaggtaccttgtcgttgtatataaacctaaccctct

SEQ ID NO: 338 - DNA, 64 bp, Artificial sequence
  hybrid RagT2-R/AvrBs28
tgtttatggttacttatcactagcatgaaggtaccttgtcgttgatatataaacctaaccctct

SEQ ID NO: 339 - DNA, 65 bp, Artificial sequence
  hybrid RagT2-R/AvrBs29
tgtttatggttacttatccactagcatgaaggtaccttgtcgttgatatataaacctaaccctct

SEQ ID NO: 340 - DNA, 66 bp, Artificial sequence
  hybrid RagT2-R/AvrBs30
tgtttatggttacttatccactagcatgaaggtaccttgtcgttgattatataaacctaaccctct

SEQ ID NO: 341 - DNA, 67 bp, Artificial sequence
  hybrid RagT2-R/AvrBs31
tgtttatggttacttataccactagcatgaaggtaccttgtcgttgattatataaacctaaccctct

SEQ ID NO: 342 - DNA, 68 bp, Artificial sequence
  hybrid RagT2-R/AvrBs32
tgtttatggttacttataccactagcatgaaggtaccttgtcgttgatttatataaacctaaccctct

SEQ ID NO: 343 - DNA, 69 bp, Artificial sequence
  hybrid RagT2-R/AvrBs33
tgtttatggttacttatgaccactagcatgaaggtaccttgtcgttgatttatataaacctaaccctct

SEQ ID NO: 344 - DNA, 70 bp, Artificial sequence
  hybrid RagT2-R/AvrBs34
tgtttatggttacttatgaccactagcatgaaggtaccttgtcgttgattctatataaacctaaccctct

SEQ ID NO: 345 - DNA, 71 bp, Artificial sequence
  hybrid RagT2-R/AvrBs35
tgtttatggttacttattgaccactagcatgaaggtaccttgtcgttgattctatataaacctaaccctct

SEQ ID NO: 346 - DNA, 72 bp, Artificial sequence
  hybrid RagT2-R/AvrBs36
tgtttatggttacttattgaccactagcatgaaggtaccttgtcgttgattcatatataaacctaaccctct

SEQ ID NO: 347 - DNA, 73 bp, Artificial sequence
  hybrid RagT2-R/AvrBs37
tgtttatggttacttatctgaccactagcatgaaggtaccttgtcgttgattcatatataaacctaaccctct

SEQ ID NO: 348 - DNA, 74 bp, Artificial sequence
  hybrid RagT2-R/AvrBs38
tgtttatggttacttatctgaccactagcatgaaggtaccttgtcgttgattcagtatataaacctaaccctct

SEQ ID NO: 349 - DNA, 75 bp, Artificial sequence
  hybrid RagT2-R/AvrBs39
tgtttatggttacttattctgaccactagcatgaaggtaccttgtcgttgattcagtatataaacctaaccctct

SEQ ID NO: 350 - DNA, 76 bp, Artificial sequence
  hybrid RagT2-R/AvrBs40
tgtttatggttacttattctgaccactagcatgaaggtaccttgtcgttgattcagttatataaacctaaccctct

SEQ ID NO: 351 - DNA, 5864 bp, Artificial sequence
  pCLS15795
ggtctttcctgcgttatcccctgattctgtggataaccgtattaccgcctttgagtgagctgataccgctcgccgcagccgaacgaccgagcgcagcgagtcagtgagcgaggaagcggagagcgcccaatacgcaaaccgcctctccccgcgcgttggccgattcattaatgcagctggcacgacaggtttcccgactggaaagcgggcagtgagcgcaacgcaattaatgtgagttagctcactcattaggcaccccaggctttacactttatgcttccggctcgtatgttgtgtggaattgtgagcggataacaatttcacacaggaaacagctatgaccatgattacgccaagcgcgtcaattaaccctcactaaagggaacaaaagctgttaattaagcgcgccacacgcaaacacaaatacacagcggccttgccaccatggtggatctacgcacgctcggctacagccagcagcaacaggagaagatcaaaccgaaggttcgttcgacagtggcgcagcaccacgaggcactggtcggccacgggtttacacacgcgcacatcgttgcgttaagccaacacccggcagcgttagggaccgtcgctgtcaagtatcaggacatgatcgcagcgttgccagaggcgacacacgaagcgatcgttggcgtcggcaaacagtggtccggcgcacgcgctctggaggccttgctcacggtggcgggagagttgagaggtccaccgttacagttggacacaggccaacttctcaagattgcaaaacgtggcggcgtgaccgcagtggaggcagtgcatgcatggcgcaatgcactgacgggtgccccgctcaacttgaccccggagcaggtggtggccatcgccagccacgatggcggcaagcaggcgctggagacggtccagcggctgttgccggtgctgtgccaggcccacggcttgaccccccagcaggtggtggccatcgccagcaatggcggtggcaagcaggcgctggagacggtccagcggctgttgccggtgctgtgccaggcccacggcttgaccccggagcaggtggtggccatcgccagcaatattggtggcaagcaggcgctggagacggtgcaggcgctgttgccggtgctgtgccaggcccacggcttgaccccccagcaggtggtggccatcgccagcaatggcggtggcaagcaggcgctggagacggtccagcggctgttgccggtgctgtgccaggcccacggcttgaccccggagcaggtggtggccatcgccagcaatattggtggcaagcaggcgctggagacggtgcaggcgctgttgccggtgctgtgccaggcccacggcttgaccccggagcaggtggtggccatcgccagcaatattggtggcaagcaggcgctggagacggtgcaggcgctgttgccggtgctgtgccaggcccacggcttgaccccggagcaggtggtggccatcgccagcaatattggtggcaagcaggcgctggagacggtgcaggcgctgttgccggtgctgtgccaggcccacggcttgaccccggagcaggtggtggccatcgccagccacgatggcggcaagcaggcgctggagacggtccagcggctgttgccggtgctgtgccaggcccacggcttgaccccggagcaggtggtggccatcgccagccacgatggcggcaagcaggcgctggagacggtccagcggctgttgccggtgctgtgccaggcccacggcttgaccccccagcaggtggtggccatcgccagcaatggcggtggcaagcaggcgctggagacggtccagcggctgttgccggtgctgtgccaggcccacggcttgaccccggagcaggtggtggccatcgccagcaatattggtggcaagcaggcgctggagacggtgcaggcgctgttgccggtgctgtgccaggcccacggcttgaccccggagcaggtggtggccatcgccagcaatattggtggcaagcaggcgctggagacggtgcaggcgctgttgccggtgctgtgccaggcccacggcttgaccccggagcaggtggtggccatcgccagccacgatggcggcaagcaggcgctggagacggtccagcggctgttgccggtgctgtgccaggcccacggcttgaccccggagcaggtggtggccatcgccagccacgatggcggcaagcaggcgctggagacggtccagcggctgttgccggtgctgtgccaggcccacggcttgaccccggagcaggtggtggccatcgccagccacgatggcggcaagcaggcgctggagacggtccagcggctgttgccggtgctgtgccaggcccacggcttgaccccccagcaggtggtggccatcgccagcaatggcggtggcaagcaggcgctggagacggtccagcggctgttgccggtgctgtgccaggcccacggcttgaccccggagcaggtggtggccatcgccagccacgatggcggcaagcaggcgctggagacggtccagcggctgttgccggtgctgtgccaggcccacggcttgacccctcagcaggtggtggccatcgccagcaatggcggcggcaggccggcgctggagagcattgttgcccagttatctcgccctgatccgggatcctccggaccgaacagaggcgttaccaagcaactagttaaatccgaactggaagagaaaaagtccgagttgcgtcataaactgaagtacgttccacatgaatacattgaactgatcgagattgcccgtaacagcacccaggacagaatcctggaaatgaaagtgatggagtttttcatgaaagtgtacggctacagaggcaaacatttgggcggtagccgtaaaccggatggtgccatctacaccgttggcagcccgatcgattacggcgtgatcgttgataccaaagcctactccggtggctacaacctgccgattggccaggctgacgaaatgcagagatacgtggaagagaaccagactcgtaacaagcatatcaacccgaacgaatggtggaaagtctacccgagttccgtgactgagttcaaatttctgtttgtgagcggccatttcaaaggcaactacaaagcccagctgaccagactgaaccatatcaccaactgcaacggtgccgtcttgagcgtggaagaactgttgattggtggcgaaatgatcaaggctggcaccctgactctggaggaagttagacgtaaattcaacaacggtgaaatcaactttggatcctcggccgactgataagtcgaccaccaccaccaccaccactgataagagctcctcgagcctgcagcagctgaagctttggacttctggcgcgcccaattcgccctatagtgagtcgtattacgtcgcgctcactggccgtcgttttacaacgtcgtgactgggaaaaccctggcgttacccaacttaatcgccttgcagcacatccccctttcgccagctggcgtaatagcgaagaggcccgcaccgaaacgcccttcccaacagttgcgcagcctgaatggcgaatgggagcgccctgtagcggcgcattaagcgcggcgggtgtggtggttacgcgcagcgtgaccgctacacttgccagcgccctagcgcccgctcctttcgctttcttcccttcctttctcgccacgttcgccggctttccccgtcaagctctaaatcgggggctccctttagggttccgatttagtgctttacggcacctcgaccccaaaaaacttgattagggtgatggttggcctgtagtgggccatagccctgatagacggtttttcgccctttgacgttggagtccacgttctttaatagtggactcttgttccaaactggaacaacactcaaccctatctcggtctattcttttgatttataagggattttgccgatttcggcctattggttaaaaaatgagctgatttaacaaaaatttaacgcgaattttaacaaaatattaacgcttacaatttaggtggcacttttcggggaaatgtgcgcggaacccctatttgtttatttttctaaatacattcaaatatgtatccgctcatgagacaataaccctgataaatgcttcaataatattgaaaaaggaagagtatgagtattcaacatttccgtgtcgcccttattcccttttttgcggcattttgccttcctgtttttgctcacccagaaacgctggtgaaagtaaaagatgctgaagatcagttgggtgcacgagtgggttacatcgaactggatctcaacagcggtaagatccttgagagttttcgccccgaagaacgttttccaatgatgagcacttttaaagttctgctatgtggcgcggtattatcccgtattgacgccgggcaagagcaactcggtcgccgcatacactattctcagaatgacttggttgagtactcaccagtcacagaaaagcatcttacggatggcatgacagtaagagaattatgcagtgctgccataaccatgagtgataacactgcggccaacttacttctgacaacgatcggaggaccgaaggagctaaccgcttttttgcacaacatgggggatcatgtaactcgccttgatcgttgggaaccggagctgaatgaagccataccaaacgacgagcgtgacaccacgatgcctgtagcaatggcaacaacgttgcgcaaactattaactggcgaactacttactctagcttcccggcaacaattaatagactggatggaggcggataaagttgcaggaccacttctgcgctcggcccttccggctggctggtttattgctgataaatctggagccggtgagcgtggttctcgcggtatcattgcagcactggggccagatggtaagccctcccgtatcgtagttatctacacgacggggagtcaggcaactatggatgaacgaaatagacagatcgctgagataggtgcctcactgattaagcattggtaactgtcagaccaagtttactcatatatactttagattgatttaaaacttcatttttaatttaaaaggatctaggtgaagatcctttttgataatctcatgaccaaaatcccttaacgtgagttttcgttccactgagcgtcagaccccgtagaaaagatcaaaggatcttcttgagatcctttttttctgcgcgtaatctgctgcttgcaaacaaaaaaaccaccgctaccagcggtggtttgtttgccggatcaagagctaccaactctttttccgaaggtaactggcttcagcagagcgcagataccaaatactgttcttctagtgtagccgtagttaggccaccacttcaagaactctgtagcaccgcctacatacctcgctctgctaatcctgttaccagtggctgctgccagtggcgataagtcgtgtcttaccgggttggactcaagacgatagttaccggataaggcgcagcggtcgggctgaacggggggttcgtgcacacagcccagcttggagcgaacgacctacaccgaactgagatacctacagcgtgagctatgagaaagcgccacgcttcccgaagggagaaaggcggacaggtatccggtaagcggcagggtcggaacaggagagcgcacgagggagcttccagggggaaacgcctggtatctttatagtcctgtcgggtttcgccacctctgacttgagcgtcgatttttgtgatgctcgtcaggggggcggagcctatggaaaaacgccagcaacgcggcctttttacggttcctggccttttgctggccttttgctcacat

SEQ ID NO: 352 - DNA, 6428 bp, Artificial sequence
  pCLS15796
ggtctttcctgcgttatcccctgattctgtggataaccgtattaccgcctttgagtgagctgataccgctcgccgcagccgaacgaccgagcgcagcgagtcagtgagcgaggaagcggagagcgcccaatacgcaaaccgcctctccccgcgcgttggccgattcattaatgcagctggcacgacaggtttcccgactggaaagcgggcagtgagcgcaacgcaattaatgtgagttagctcactcattaggcaccccaggctttacactttatgcttccggctcgtatgttgtgtggaattgtgagcggataacaatttcacacaggaaacagctatgaccatgattacgccaagcgcgtcaattaaccctcactaaagggaacaaaagctgttaattaagcgcgccacacgcaaacacaaatacacagcggccttgccaccatggccaagtctggcatctaccagattaagaacaccctgaataacaaagtgtatgttggatctgccaaggactttgagaaaagatggaagaggcacttcaaggatctggaaaagggttgccacagctccatcaagctccaaaggtctttcaacaaacatggcaatgtctttgagtgctccattttggaagagatcccttatgaaaaggacctcattatagagagggaaaacttctggatcaaggagctgaactcaaaaatcaatggatacaacattgcagatgccacatttggtgacacctgttctactcacccccttaaggaagagatcattaaaaagaggtctgagactgtgaaggctaagatgttgaaactggggcctgatggcagaaaggcactctactctaagccaggtagcaaaaatggaaggtggaaccctgagacccacaagttctgcaaatgtggggtgagaatacagacatcagcctacacttgcagcaagtgtaggaacagatcaggagagaataactcctttttcaaccacaagcattctcaaggtccatccggagtggatctacgcacgctcggctacagccagcagcaacaggagaagatcaaaccgaaggttcgttcgacagtggcgcagcaccacgaggcactggtcggccacgggtttacacacgcgcacatcgttgcgttaagccaacacccggcagcgttagggaccgtcgctgtcaagtatcaggacatgatcgcagcgttgccagaggcgacacacgaagcgatcgttggcgtcggcaaacagtggtccggcgcacgcgctctggaggccttgctcacggtggcgggagagttgagaggtccaccgttacagttggacacaggccaacttctcaagattgcaaaacgtggcggcgtgaccgcagtggaggcagtgcatgcatggcgcaatgcactgacgggtgccccgctcaacttgaccccggagcaggtggtggccatcgccagccacgatggcggcaagcaggcgctggagacggtccagcggctgttgccggtgctgtgccaggcccacggcttgaccccccagcaggtggtggccatcgccagcaatggcggtggcaagcaggcgctggagacggtccagcggctgttgccggtgctgtgccaggcccacggcttgaccccggagcaggtggtggccatcgccagcaatattggtggcaagcaggcgctggagacggtgcaggcgctgttgccggtgctgtgccaggcccacggcttgaccccccagcaggtggtggccatcgccagcaatggcggtggcaagcaggcgctggagacggtccagcggctgttgccggtgctgtgccaggcccacggcttgaccccggagcaggtggtggccatcgccagcaatattggtggcaagcaggcgctggagacggtgcaggcgctgttgccggtgctgtgccaggcccacggcttgaccccggagcaggtggtggccatcgccagcaatattggtggcaagcaggcgctggagacggtgcaggcgctgttgccggtgctgtgccaggcccacggcttgaccccggagcaggtggtggccatcgccagcaatattggtggcaagcaggcgctggagacggtgcaggcgctgttgccggtgctgtgccaggcccacggcttgaccccggagcaggtggtggccatcgccagccacgatggcggcaagcaggcgctggagacggtccagcggctgttgccggtgctgtgccaggcccacggcttgaccccggagcaggtggtggccatcgccagccacgatggcggcaagcaggcgctggagacggtccagcggctgttgccggtgctgtgccaggcccacggcttgaccccccagcaggtggtggccatcgccagcaatggcggtggcaagcaggcgctggagacggtccagcggctgttgccggtgctgtgccaggcccacggcttgaccccggagcaggtggtggccatcgccagcaatattggtggcaagcaggcgctggagacggtgcaggcgctgttgccggtgctgtgccaggcccacggcttgaccccggagcaggtggtggccatcgccagcaatattggtggcaagcaggcgctggagacggtgcaggcgctgttgccggtgctgtgccaggcccacggcttgaccccggagcaggtggtggccatcgccagccacgatggcggcaagcaggcgctggagacggtccagcggctgttgccggtgctgtgccaggcccacggcttgaccccggagcaggtggtggccatcgccagccacgatggcggcaagcaggcgctggagacggtccagcggctgttgccggtgctgtgccaggcccacggcttgaccccggagcaggtggtggccatcgccagccacgatggcggcaagcaggcgctggagacggtccagcggctgttgccggtgctgtgccaggcccacggcttgaccccccagcaggtggtggccatcgccagcaatggcggtggcaagcaggcgctggagacggtccagcggctgttgccggtgctgtgccaggcccacggcttgaccccggagcaggtggtggccatcgccagccacgatggcggcaagcaggcgctggagacggtccagcggctgttgccggtgctgtgccaggcccacggcttgacccctcagcaggtggtggccatcgccagcaatggcggcggcaggccggcgctggagagcattgttgcccagttatctcgccctgatccgggatcctccggaccgaacagaggcgttaccaagcaactagttaaatccgaactggaagagaaaaagtccgagttgcgtcataaactgaagtacgttccacatgaatacattgaactgatcgagattgcccgtaacagcacccaggacagaatcctggaaatgaaagtgatggagtttttcatgaaagtgtacggctacagaggcaaacatttgggcggtagccgtaaaccggatggtgccatctacaccgttggcagcccgatcgattacggcgtgatcgttgataccaaagcctactccggtggctacaacctgccgattggccaggctgacgaaatgcagagatacgtggaagagaaccagactcgtaacaagcatatcaacccgaacgaatggtggaaagtctacccgagttccgtgactgagttcaaatttctgtttgtgagcggccatttcaaaggcaactacaaagcccagctgaccagactgaaccatatcaccaactgcaacggtgccgtcttgagcgtggaagaactgttgattggtggcgaaatgatcaaggctggcaccctgactctggaggaagttagacgtaaattcaacaacggtgaaatcaactttggatcctcggccgactgataagtcgaccaccaccaccaccaccactgataagagctcctcgagcctgcagcagctgaagctttggacttctggcgcgcccaattcgccctatagtgagtcgtattacgtcgcgctcactggccgtcgttttacaacgtcgtgactgggaaaaccctggcgttacccaacttaatcgccttgcagcacatccccctttcgccagctggcgtaatagcgaagaggcccgcaccgaaacgcccttcccaacagttgcgcagcctgaatggcgaatgggagcgccctgtagcggcgcattaagcgcggcgggtgtggtggttacgcgcagcgtgaccgctacacttgccagcgccctagcgcccgctcctttcgctttcttcccttcctttctcgccacgttcgccggctttccccgtcaagctctaaatcgggggctccctttagggttccgatttagtgctttacggcacctcgaccccaaaaaacttgattagggtgatggttggcctgtagtgggccatagccctgatagacggtttttcgccctttgacgttggagtccacgttctttaatagtggactcttgttccaaactggaacaacactcaaccctatctcggtctattcttttgatttataagggattttgccgatttcggcctattggttaaaaaatgagctgatttaacaaaaatttaacgcgaattttaacaaaatattaacgcttacaatttaggtggcacttttcggggaaatgtgcgcggaacccctatttgtttatttttctaaatacattcaaatatgtatccgctcatgagacaataaccctgataaatgcttcaataatattgaaaaaggaagagtatgagtattcaacatttccgtgtcgcccttattcccttttttgcggcattttgccttcctgtttttgctcacccagaaacgctggtgaaagtaaaagatgctgaagatcagttgggtgcacgagtgggttacatcgaactggatctcaacagcggtaagatccttgagagttttcgccccgaagaacgttttccaatgatgagcacttttaaagttctgctatgtggcgcggtattatcccgtattgacgccgggcaagagcaactcggtcgccgcatacactattctcagaatgacttggttgagtactcaccagtcacagaaaagcatcttacggatggcatgacagtaagagaattatgcagtgctgccataaccatgagtgataacactgcggccaacttacttctgacaacgatcggaggaccgaaggagctaaccgcttttttgcacaacatgggggatcatgtaactcgccttgatcgttgggaaccggagctgaatgaagccataccaaacgacgagcgtgacaccacgatgcctgtagcaatggcaacaacgttgcgcaaactattaactggcgaactacttactctagcttcccggcaacaattaatagactggatggaggcggataaagttgcaggaccacttctgcgctcggcccttccggctggctggtttattgctgataaatctggagccggtgagcgtggttctcgcggtatcattgcagcactggggccagatggtaagccctcccgtatcgtagttatctacacgacggggagtcaggcaactatggatgaacgaaatagacagatcgctgagataggtgcctcactgattaagcattggtaactgtcagaccaagtttactcatatatactttagattgatttaaaacttcatttttaatttaaaaggatctaggtgaagatcctttttgataatctcatgaccaaaatcccttaacgtgagttttcgttccactgagcgtcagaccccgtagaaaagatcaaaggatcttcttgagatcctttttttctgcgcgtaatctgctgcttgcaaacaaaaaaaccaccgctaccagcggtggtttgtttgccggatcaagagctaccaactctttttccgaaggtaactggcttcagcagagcgcagataccaaatactgttcttctagtgtagccgtagttaggccaccacttcaagaactctgtagcaccgcctacatacctcgctctgctaatcctgttaccagtggctgctgccagtggcgataagtcgtgtcttaccgggttggactcaagacgatagttaccggataaggcgcagcggtcgggctgaacggggggttcgtgcacacagcccagcttggagcgaacgacctacaccgaactgagatacctacagcgtgagctatgagaaagcgccacgcttcccgaagggagaaaggcggacaggtatccggtaagcggcagggtcggaacaggagagcgcacgagggagcttccagggggaaacgcctggtatctttatagtcctgtcgggtttcgccacctctgacttgagcgtcgatttttgtgatgctcgtcaggggggcggagcctatggaaaaacgccagcaacgcggcctttttacggttcctggccttttgctggccttttgctcacat

SEQ ID NO: 353 - DNA, 6362 bp, Artificial sequence
  pCLS15797
ggtctttcctgcgttatcccctgattctgtggataaccgtattaccgcctttgagtgagctgataccgctcgccgcagccgaacgaccgagcgcagcgagtcagtgagcgaggaagcggagagcgcccaatacgcaaaccgcctctccccgcgcgttggccgattcattaatgcagctggcacgacaggtttcccgactggaaagcgggcagtgagcgcaacgcaattaatgtgagttagctcactcattaggcaccccaggctttacactttatgcttccggctcgtatgttgtgtggaattgtgagcggataacaatttcacacaggaaacagctatgaccatgattacgccaagcgcgtcaattaaccctcactaaagggaacaaaagctgttaattaagcgcgccacacgcaaacacaaatacacagcggccttgccaccatggccaagtctggcatctaccagattaagaacaccctgaataacaaagtgtatgttggatctgccaaggactttgagaaaagatggaagaggcacttcaaggatctggaaaagggttgccacagctccatcaagctccaaaggtctttcaacaaacatggcaatgtctttgagtgctccattttggaagagatcccttatgaaaaggacctcattatagagagggaaaacttctggatcaaggagctgaactcaaaaatcaatggatacaacattgcagatgccacatttggtgacacctgttctactcacccccttaaggaagagatcattaaaaagaggtctgagactgtgaaggctaagatgttgaaactggggcctgatggcagaaaggcactctactctaagccaggtagcaaaaatggaaggtggaaccctgagacccacaagttctgcaaatgtggggtgagaatacagacatcagcctacacttgcagcaagtgtaggaacagatcaggagagaataactcctttttcaaccacaagcattctcaaggtccatccggagtggatctacgcacgctcggctacagccagcagcaacaggagaagatcaaaccgaaggttcgttcgacagtggcgcagcaccacgaggcactggtcggccacgggtttacacacgcgcacatcgttgcgttaagccaacacccggcagcgttagggaccgtcgctgtcaagtatcaggacatgatcgcagcgttgccagaggcgacacacgaagcgatcgttggcgtcggcaaacagtggtccggcgcacgcgctctggaggccttgctcacggtggcgggagagttgagaggtccaccgttacagttggacacaggccaacttctcaagattgcaaaacgtggcggcgtgaccgcagtggaggcagtgcatgcatggcgcaatgcactgacgggtgccccgctcaacttgaccccggagcaggtggtggccatcgccagccacgatggcggcaagcaggcgctggagacggtccagcggctgttgccggtgctgtgccaggcccacggcttgaccccccagcaggtggtggccatcgccagcaatggcggtggcaagcaggcgctggagacggtccagcggctgttgccggtgctgtgccaggcccacggcttgaccccggagcaggtggtggccatcgccagcaatattggtggcaagcaggcgctggagacggtgcaggcgctgttgccggtgctgtgccaggcccacggcttgaccccccagcaggtggtggccatcgccagcaatggcggtggcaagcaggcgctggagacggtccagcggctgttgccggtgctgtgccaggcccacggcttgaccccggagcaggtggtggccatcgccagcaatattggtggcaagcaggcgctggagacggtgcaggcgctgttgccggtgctgtgccaggcccacggcttgaccccggagcaggtggtggccatcgccagcaatattggtggcaagcaggcgctggagacggtgcaggcgctgttgccggtgctgtgccaggcccacggcttgaccccggagcaggtggtggccatcgccagcaatattggtggcaagcaggcgctggagacggtgcaggcgctgttgccggtgctgtgccaggcccacggcttgaccccggagcaggtggtggccatcgccagccacgatggcggcaagcaggcgctggagacggtccagcggctgttgccggtgctgtgccaggcccacggcttgaccccggagcaggtggtggccatcgccagccacgatggcggcaagcaggcgctggagacggtccagcggctgttgccggtgctgtgccaggcccacggcttgaccccccagcaggtggtggccatcgccagcaatggcggtggcaagcaggcgctggagacggtccagcggctgttgccggtgctgtgccaggcccacggcttgaccccggagcaggtggtggccatcgccagcaatattggtggcaagcaggcgctggagacggtgcaggcgctgttgccggtgctgtgccaggcccacggcttgaccccggagcaggtggtggccatcgccagcaatattggtggcaagcaggcgctggagacggtgcaggcgctgttgccggtgctgtgccaggcccacggcttgaccccggagcaggtggtggccatcgccagccacgatggcggcaagcaggcgctggagacggtccagcggctgttgccggtgctgtgccaggcccacggcttgaccccggagcaggtggtggccatcgccagccacgatggcggcaagcaggcgctggagacggtccagcggctgttgccggtgctgtgccaggcccacggcttgaccccggagcaggtggtggccatcgccagccacgatggcggcaagcaggcgctggagacggtccagcggctgttgccggtgctgtgccaggcccacggcttgaccccccagcaggtggtggccatcgccagcaatggcggtggcaagcaggcgctggagacggtccagcggctgttgccggtgctgtgccaggcccacggcttgaccccggagcaggtggtggccatcgccagccacgatggcggcaagcaggcgctggagacggtccagcggctgttgccggtgctgtgccaggcccacggcttgacccctcagcaggtggtggccatcgccagcaatggcggcggcaggccggcgctggagagcattgttgcccagttatctcgccctgatccgggatccaagtctggcatctaccagattaagaacaccctgaataacaaagtgtatgttggatctgccaaggactttgagaaaagatggaagaggcacttcaaggatctggaaaagggttgccacagctccatcaagctccaaaggtctttcaacaaacatggcaatgtctttgagtgctccattttggaagagatcccttatgaaaaggacctcattatagagagggaaaacttctggatcaaggagctgaactcaaaaatcaatggatacaacattgcagatgccacatttggtgacacctgttctactcacccccttaaggaagagatcattaaaaagaggtctgagactgtgaaggctaagatgttgaaactggggcctgatggcagaaaggcactctactctaagccaggtagcaaaaatggaaggtggaaccctgagacccacaagttctgcaaatgtggggtgagaatacagacatcagcctacacttgcagcaagtgtaggaacagatcaggagagaataactcctttttcaaccacaagcattctcaaggtccatcggccgactgataagtcgaccaccaccaccaccaccactgataagagctcctcgagcctgcagcagctgaagctttggacttctggcgcgcccaattcgccctatagtgagtcgtattacgtcgcgctcactggccgtcgttttacaacgtcgtgactgggaaaaccctggcgttacccaacttaatcgccttgcagcacatccccctttcgccagctggcgtaatagcgaagaggcccgcaccgaaacgcccttcccaacagttgcgcagcctgaatggcgaatgggagcgccctgtagcggcgcattaagcgcggcgggtgtggtggttacgcgcagcgtgaccgctacacttgccagcgccctagcgcccgctcctttcgctttcttcccttcctttctcgccacgttcgccggctttccccgtcaagctctaaatcgggggctccctttagggttccgatttagtgctttacggcacctcgaccccaaaaaacttgattagggtgatggttggcctgtagtgggccatagccctgatagacggtttttcgccctttgacgttggagtccacgttctttaatagtggactcttgttccaaactggaacaacactcaaccctatctcggtctattcttttgatttataagggattttgccgatttcggcctattggttaaaaaatgagctgatttaacaaaaatttaacgcgaattttaacaaaatattaacgcttacaatttaggtggcacttttcggggaaatgtgcgcggaacccctatttgtttatttttctaaatacattcaaatatgtatccgctcatgagacaataaccctgataaatgcttcaataatattgaaaaaggaagagtatgagtattcaacatttccgtgtcgcccttattcccttttttgcggcattttgccttcctgtttttgctcacccagaaacgctggtgaaagtaaaagatgctgaagatcagttgggtgcacgagtgggttacatcgaactggatctcaacagcggtaagatccttgagagttttcgccccgaagaacgttttccaatgatgagcacttttaaagttctgctatgtggcgcggtattatcccgtattgacgccgggcaagagcaactcggtcgccgcatacactattctcagaatgacttggttgagtactcaccagtcacagaaaagcatcttacggatggcatgacagtaagagaattatgcagtgctgccataaccatgagtgataacactgcggccaacttacttctgacaacgatcggaggaccgaaggagctaaccgcttttttgcacaacatgggggatcatgtaactcgccttgatcgttgggaaccggagctgaatgaagccataccaaacgacgagcgtgacaccacgatgcctgtagcaatggcaacaacgttgcgcaaactattaactggcgaactacttactctagcttcccggcaacaattaatagactggatggaggcggataaagttgcaggaccacttctgcgctcggcccttccggctggctggtttattgctgataaatctggagccggtgagcgtggttctcgcggtatcattgcagcactggggccagatggtaagccctcccgtatcgtagttatctacacgacggggagtcaggcaactatggatgaacgaaatagacagatcgctgagataggtgcctcactgattaagcattggtaactgtcagaccaagtttactcatatatactttagattgatttaaaacttcatttttaatttaaaaggatctaggtgaagatcctttttgataatctcatgaccaaaatcccttaacgtgagttttcgttccactgagcgtcagaccccgtagaaaagatcaaaggatcttcttgagatcctttttttctgcgcgtaatctgctgcttgcaaacaaaaaaaccaccgctaccagcggtggtttgtttgccggatcaagagctaccaactctttttccgaaggtaactggcttcagcagagcgcagataccaaatactgttcttctagtgtagccgtagttaggccaccacttcaagaactctgtagcaccgcctacatacctcgctctgctaatcctgttaccagtggctgctgccagtggcgataagtcgtgtcttaccgggttggactcaagacgatagttaccggataaggcgcagcggtcgggctgaacggggggttcgtgcacacagcccagcttggagcgaacgacctacaccgaactgagatacctacagcgtgagctatgagaaagcgccacgcttcccgaagggagaaaggcggacaggtatccggtaagcggcagggtcggaacaggagagcgcacgagggagcttccagggggaaacgcctggtatctttatagtcctgtcgggtttcgccacctctgacttgagcgtcgatttttgtgatgctcgtcaggggggcggagcctatggaaaaacgccagcaacgcggcctttttacggttcctggccttttgctggccttttgctcacat

SEQ ID NO: 354 - DNA, 11739 bp, Artificial sequence
  pCLS13299
atgtgagcaaaaggccagcaaaaggccaggaaccgtaaaaaggccgcgttgctggcgtttttccataggctccgcccccctgacgagcatcacaaaaatcgacgctcaagtcagaggtggcgaaacccgacaggactataaagataccaggcgtttccccctggaagctccctcgtgcgctctcctgttccgaccctgccgcttaccggatacctgtccgcctttctcccttcgggaagcgtggcgctttctcatagctcacgctgtaggtatctcagttcggtgtaggtcgttcgctccaagctgggctgtgtgcacgaaccccccgttcagcccgaccgctgcgccttatccggtaactatcgtcttgagtccaacccggtaagacacgacttatcgccactggcagcagccactggtaacaggattagcagagcgaggtatgtaggcggtgctacagagttcttgaagtggtggcctaactacggctacactagaaggacagtatttggtatctgcgctctgctgaagccagttaccttcggaaaaagagttggtagctcttgatccggcaaacaaaccaccgctggtagcggtggtttttttgtttgcaagcagcagattacgcgcagaaaaaaaggatctcaagaagatcctttgatcttttctacggggtctgacgctcagtggaacgaaaactcacgttaagggattttggtcatgagattatcaaaaaggatcttcacctagatccttttaaattaaaaatgaagttttaaatcaatctaaagtatatatgagtaaacttggtctgacagttaccaatgcttaatcagtgaggcacctatctcagcgatctgtctatttcgttcatccatagttgcctgactccccgtcgtgtagataactacgatacgggagggcttaccatctggccccagtgctgcaatgataccgcgagacccacgctcaccggctccagatttatcagcaataaaccagccagccggaagggccgagcgcagaagtggtcctgcaactttatccgcctccatccagtctattaattgttgccgggaagctagagtaagtagttcgccagttaatagtttgcgcaacgttgttgccattgctacaggcatcgtggtgtcacgctcgtcgtttggtatggcttcattcagctccggttcccaacgatcaaggcgagttacatgatcccccatgttgtgcaaaaaagcggttagctccttcggtcctccgatcgttgtcagaagtaagttggccgcagtgttatcactcatggttatggcagcactgcataattctcttactgtcatgccatccgtaagatgcttttctgtgactggtgagtactcaaccaagtcattctgagaatagtgtatgcggcgaccgagttgctcttgcccggcgtcaatacgggataataccgcgccacatagcagaactttaaaagtgctcatcattggaaaacgttcttcggggcgaaaactctcaaggatcttaccgctgttgagatccagttcgatgtaacccactcgtgcacccaactgatcttcagcatcttttactttcaccagcgtttctgggtgagcaaaaacaggaaggcaaaatgccgcaaaaaagggaataagggcgacacggaaatgttgaatactcatactcttcctttttcaatattattgaagcatttatcagggttattgtctcatgagcggatacatatttgaatgtatttagaaaaataaacaaataggggttccgcgcacatttccccgaaaagtgccacctgacgtccgatcaaaaatcatcgcttcgctgattaattaccccagaaataaggctaaaaaactaatcgcattatcatcctatggttgttaatttgattcgttcatttgaaggtttgtggggccaggttactgccaatttttcctcttcataaccataaaagctagtattgtagaatctttattgttcggagcagtgcggcgcgaggcacatctgcgtttcaggaacgcgaccggtgaagacgaggacgcacggaggagagtcttccttcggagggctgtcacccgctcggcggcttctaatccgtacttcaatatagcaatgagcagttaagcgtattactgaaagttccaaagagaaggtttttttaggctaatcgacctcgagcagatccgccaggcgtgtatatagcgtggatggccaggcaactttagtgctgacacatacaggcatatatatatgtgtgcgacgacacatgatcatatggcatgcatgtgctctgtatgtatataaaactcttgttttcttcttttctctaaatattctttccttatacattaggtcctttgtagcataaattactatacttctatagacacgcaaacacaaatacacagcggccttgccaccatggccaagtctggcatctaccagattaagaacaccctgaataacaaagtgtatgttggatctgccaaggactttgagaaaagatggaagaggcacttcaaggatctggaaaagggttgccacagctccatcaagctccaaaggtctttcaacaaacatggcaatgtctttgagtgctccattttggaagagatcccttatgaaaaggacctcattatagagagggaaaacttctggatcaaggagctgaactcaaaaatcaatggatacaacattgcagatgccacatttggtgacacctgttctactcacccccttaaggaagagatcattaaaaagaggtctgagactgtgaaggctaagatgttgaaactggggcctgatggcagaaaggcactctactctaagccaggtagcaaaaatggaaggtggaaccctgagacccacaagttctgcaaatgtggggtgagaatacagacatcagcctacacttgcagcaagtgtaggaacagatcaggagagaataactcctttttcaaccacaagcattctcaaggtccatccggagtggatctacgcacgctcggctacagccagcagcaacaggagaagatcaaaccgaaggttcgttcgacagtggcgcagcaccacgaggcactggtcggccacgggtttacacacgcgcacatcgttgcgttaagccaacacccggcagcgttagggaccgtcgctgtcaagtatcaggacatgatcgcagcgttgccagaggcgacacacgaagcgatcgttggcgtcggcaaacagtggtccggcgcacgcgctctggaggccttgctcacggtggcgggagagttgagaggtccaccgttacagttggacacaggccaacttctcaagattgcaaaacgtggcggcgtgaccgcagtggaggcagtgcatgcatggcgcaatgcactgacgggtgccccgctcaacttgaccccggagcaggtggtggccatcgccagccacgatggcggcaagcaggcgctggagacggtccagcggctgttgccggtgctgtgccaggcccacggcttgaccccccagcaggtggtggccatcgccagcaatggcggtggcaagcaggcgctggagacggtccagcggctgttgccggtgctgtgccaggcccacggcttgaccccggagcaggtggtggccatcgccagcaatattggtggcaagcaggcgctggagacggtgcaggcgctgttgccggtgctgtgccaggcccacggcttgaccccccagcaggtggtggccatcgccagcaatggcggtggcaagcaggcgctggagacggtccagcggctgttgccggtgctgtgccaggcccacggcttgaccccggagcaggtggtggccatcgccagcaatattggtggcaagcaggcgctggagacggtgcaggcgctgttgccggtgctgtgccaggcccacggcttgaccccggagcaggtggtggccatcgccagcaatattggtggcaagcaggcgctggagacggtgcaggcgctgttgccggtgctgtgccaggcccacggcttgaccccggagcaggtggtggccatcgccagcaatattggtggcaagcaggcgctggagacggtgcaggcgctgttgccggtgctgtgccaggcccacggcttgaccccggagcaggtggtggccatcgccagccacgatggcggcaagcaggcgctggagacggtccagcggctgttgccggtgctgtgccaggcccacggcttgaccccggagcaggtggtggccatcgccagccacgatggcggcaagcaggcgctggagacggtccagcggctgttgccggtgctgtgccaggcccacggcttgaccccccagcaggtggtggccatcgccagcaatggcggtggcaagcaggcgctggagacggtccagcggctgttgccggtgctgtgccaggcccacggcttgaccccggagcaggtggtggccatcgccagcaatattggtggcaagcaggcgctggagacggtgcaggcgctgttgccggtgctgtgccaggcccacggcttgaccccggagcaggtggtggccatcgccagcaatattggtggcaagcaggcgctggagacggtgcaggcgctgttgccggtgctgtgccaggcccacggcttgaccccggagcaggtggtggccatcgccagccacgatggcggcaagcaggcgctggagacggtccagcggctgttgccggtgctgtgccaggcccacggcttgaccccggagcaggtggtggccatcgccagccacgatggcggcaagcaggcgctggagacggtccagcggctgttgccggtgctgtgccaggcccacggcttgaccccggagcaggtggtggccatcgccagccacgatggcggcaagcaggcgctggagacggtccagcggctgttgccggtgctgtgccaggcccacggcttgaccccccagcaggtggtggccatcgccagcaatggcggtggcaagcaggcgctggagacggtccagcggctgttgccggtgctgtgccaggcccacggcttgaccccggagcaggtggtggccatcgccagccacgatggcggcaagcaggcgctggagacggtccagcggctgttgccggtgctgtgccaggcccacggcttgacccctcagcaggtggtggccatcgccagcaatggcggcggcaggccggcgctggagagcattgttgcccagttatctcgccctgatccgggatcctccggaccgaacagaggcgttaccaagcaactagttaaatccgaactggaagagaaaaagtccgagttgcgtcataaactgaagtacgttccacatgaatacattgaactgatcgagattgcccgtaacagcacccaggacagaatcctggaaatgaaagtgatggagtttttcatgaaagtgtacggctacagaggcaaacatttgggcggtagccgtaaaccggatggtgccatctacaccgttggcagcccgatcgattacggcgtgatcgttgataccaaagcctactccggtggctacaacctgccgattggccaggctgacgaaatgcagagatacgtggaagagaaccagactcgtaacaagcatatcaacccgaacgaatggtggaaagtctacccgagttccgtgactgagttcaaatttctgtttgtgagcggccatttcaaaggcaactacaaagcccagctgaccagactgaaccatatcaccaactgcaacggtgccgtcttgagcgtggaagaactgttgattggtggcgaaatgatcaaggctggcaccctgactctggaggaagttagacgtaaattcaacaacggtgaaatcaactttggatcctcggccgactgataactcgagcgatcctctagacgagctcctcgagcctgcagcagctgaagctttggacttcttcgccagaggtttggtcaagtctccaatcaaggttgtcggcttgtctaccttgccagaaatttacgaaaagatggaaaagggtcaaatcgttggtagatacgttgttgacacttctaaataagcgaatttcttatgatttatgatttttattattaaataagttataaaaaaaataagtgtatacaaattttaaagtgactcttaggttttaaaacgaaaattcttattcttgagtaactctttcctgtaggtcaggttgctttctcaggtatagcatgaggtcgctcttattgaccacacctctaccggcatgcaagcttggcgtaatcatggtcatagctgtttcctgtgtgaaattgttatccgctcacaattccacacaacatacgagccggaagcataaagtgtaaagcctggggtgcctaatgagtgagctaactcacattaattgcgttgcgctcactgcccgctttccagtcgggaaacctgtcgtgccagcagatctattacattatgggtggtatgttggaataaaaatcaactatcatctactaactagtatttacgttactagtatattatcatatacggtgttagaagatgacgcaaatgatgagaaatagtcatctaaattagtggaagctgaaacgcaaggattgataatgtaataggatcaatgaatattaacatataaaatgatgataataatatttatagaattgtgtagaattgcagattcccttttatggattcctaaatcctcgaggagaacttctagtatatctacatacctaatattattgccttattaaaaatggaatcccaacaattacatcaaaatccacattctcttcaaaatcaattgtcctgtacttccttgttcatgtgtgttcaaaaacgttatatttataggataattatactctatttctcaacaagtaattggttgtttggccgagcggtctaaggcgcctgattcaagaaatatcttgaccgcagttaactgtgggaatactcaggtatcgtaagatgcaagagttcgaatctcttagcaaccattatttttttcctcaacataacgagaacacacaggggcgctatcgcacagaatcaaattcgatgactggaaattttttgttaatttcagaggtcgcctgacgcatatacctttttcaactgaaaaattgggagaaaaaggaaaggtgagagccgcggaaccggcttttcatatagaatagagaagcgttcatgactaaatgcttgcatcacaatacttgaagttgacaatattatttaaggacctattgttttttccaataggtggttagcaatcgtcttactttctaacttttcttaccttttacatttcagcaatatatatatatatatttcaaggatataccattctaatgtctgcccctaagaagatcgtcgttttgccaggtgaccacgttggtcaagaaatcacagccgaagccattaaggttcttaaagctatttctgatgttcgttccaatgtcaagttcgatttcgaaaatcatttaattggtggtgctgctatcgatgctacaggtgtcccacttccagatgaggcgctggaagcctccaagaaggttgatgccgttttgttaggtgctgtgggtggtcctaaatggggtaccggtagtgttagacctgaacaaggtttactaaaaatccgtaaagaacttcaattgtacgccaacttaagaccatgtaactttgcatccgactctcttttagacttatctccaatcaagccacaatttgctaaaggtactgacttcgttgttgtcagagaattagtgggaggtatttactttggtaagagaaaggaagacgatggtgatggtgtcgcttgggatagtgaacaatacaccgttccagaagtgcaaagaatcacaagaatggccgctttcatggccctacaacatgagccaccattgcctatttggtccttggataaagctaatgttttggcctcttcaagattatggagaaaaactgtggaggaaaccatcaagaacgaattccctacattgaaggttcaacatcaattgattgattctgccgccatgatcctagttaagaacccaacccacctaaatggtattataatcaccagcaacatgtttggtgatatcatctccgatgaagcctccgttatcccaggttccttgggtttgttgccatctgcgtccttggcctctttgccagacaagaacaccgcatttggtttgtacgaaccatgccacggttctgctccagatttgccaaagaataaggtcaaccctatcgccactatcttgtctgctgcaatgatgttgaaattgtcattgaacttgcctgaagaaggtaaggccattgaagatgcagttaaaaaggttttggatgcaggtatcagaactggtgatttaggtggttccaacagtaccacggaagtcggtgatgctgtcgccgaagaagttaagaaaatccttgcttaaaaagattctctttttttatgatatttgtacataaactttataaatgaaattcataatagaaacgacacgaaattacaaaatggaatatgttcatagggtagacgaaactatatacgcaatctacatacatttatcaagaaggagaaaaaggaggatgtaaaggaatacaggtaagcaaattgatactaatggctcaacgtgataaggaaaaagaattgcactttaacattaatattgacaaggaggagggcaccacacaaaaagttaggtgtaacagaaaatcatgaaactatgattcctaatttatatattggaggattttctctaaaaaaaaaaaaatacaacaaataaaaaacactcaatgacctgaccatttgatggagtttaagtcaataccttcttgaaccatttcccataatggtgaaagttccctcaagaattttactctgtcagaaacggccttaacgacgtagtcgacctcctcttcagtactaaatctaccaataccaaatctgatggaagaatgggctaatgcatcatccttacccagcgcatgtaaaacataagaaggttctagggaagcagatgtacaggctgaacccgaggataatgcgatatcccttagtgccatcaataaagattctccttccacgtaggcgaaagaaacgttaacacaccctggataacgatgatctggagatccgttcaacgtggtatgttcagcggataatagacctttgactaatttatcggatagtcttttgatgtgagcttggtcgttgtcaaattctttcttcatcaatctcgcagcttcaccaaatcccgctaccaatgggggggccaaagtaccagatctgctgcattaatgaatcggccaacgcgcggggagaggcggtttgcgtattgggcgctcttccgcttcctcgctcactgactcgctgcgctcggtcgttcggctgcggcgagcggtatcagcatcgatgaattccacggactatagactatactagtatactccgtctactgtacgatacacttccgctcaggtccttgtcctttaacgaggccttaccactcttttgttactctattgatccagctcagcaaaggcagtgtgatctaagattctatcttcgcgatgtagtaaaactagctagaccgagaaagagactagaaatgcaaaaggcacttctacaatggctgccatcattattatccgatgtgacgctgcagcttctcaatgatattcgaatacgctttgaggagatacagcctaatatccgacaaactgttttacagatttacgatcgtacttgttacccatcattgaattttgaacatccgaacctgggagttttccctgaaacagatagtatatttgaacctgtataataatatatagtctagcgctttacggaagacaatgtatgtatttcggttcctggagaaactattgcatctattgcataggtaatcttgcacgtcgcatccccggttcattttctgcgtttccatcttgcacttcaatagcatatctttgttaacgaagcatctgtgcttcattttgtagaacaaaaatgcaacgcgagagcgctaatttttcaaacaaagaatctgagctgcatttttacagaacagaaatgcaacgcgaaagcgctattttaccaacgaagaatctgtgcttcatttttgtaaaacaaaaatgcaacgcgagagcgctaatttttcaaacaaagaatctgagctgcatttttacagaacagaaatgcaacgcgagagcgctattttaccaacaaagaatctatacttcttttttgttctacaaaaatgcatcccgagagcgctatttttctaacaaagcatcttagattactttttttctcctttgtgcgctctataatgcagtctcttgataactttttgcactgtaggtccgttaaggttagaagaaggctactttggtgtctattttctcttccataaaaaaagcctgactccacttcccgcgtttactgattactagcgaagctgcgggtgcattttttcaagataaaggcatccccgattatattctataccgatgtggattgcgcatactttgtgaacagaaagtgatagcgttgatgattcttcattggtcagaaaattatgaacggtttcttctattttgtctctatatactacgtataggaaatgtttacattttcgtattgttttcgattcactctatgaatagttcttactacaatttttttgtctaaagagtaatactagagataaacataaaaaatgtagaggtcgagtttagatgcaagttcaaggagcgaaaggtggatgggtaggttatatagggatatagcacagagatatatagcaaagagatacttttgagcaatgtttgtggaagcggtattcgcaatattttagtagctcgttacagtccggtgcgtttttggttttttgaaagtgcgtcttcagagcgcttttggttttcaaaagcgctctgaagttcctatactttctagagaataggaacttcggaataggaacttcaaagcgtttccgaaaacgagcgcttccgaaaatgcaacgcgagctgcgcacatacagctcactgttcacgtcgcacctatatctgcgtgttgcctgtatatatatatacatgagaagaacggcatagtgcgtgtttatgcttaaatgcgtacttatatgcgtctatttatgtaggatgaaaggtagtctagtacctcctgtgatattatcccattccatgcggggtatcgtatgcttccttcagcactaccctttagctgttctatatgctgccactcctcaattggattagtctcatccttcaatgctatcatttcctttgatattggatcatatgcatagtaccgagaaactagtgcgaagtagtgatcaggtattgctgttatctgatgagtatacgttgtcctggccacggcagaagcacgcttatcgctccaatttcccacaacattagtcaactccgttaggcccttcattgaaagaaatgaggtcatcaaatgtcttccaatgtgagattttgggccattttttatagcaaagattgaataaggcgcatttttcttcaaagctttattgtacgatctgactaagttatcttttaataattggtattcctgtttattgcttgaagaattgccggtcctatttactcgttttaggactggttcagaattcatcgatgctcactcaaaggtcggtaatacggttatccacagaatcaggggataacgcaggaaagaac

SEQ ID NO: 355 - DNA, 11673 bp, Artificial sequence
  pCLS13301
atgtgagcaaaaggccagcaaaaggccaggaaccgtaaaaaggccgcgttgctggcgtttttccataggctccgcccccctgacgagcatcacaaaaatcgacgctcaagtcagaggtggcgaaacccgacaggactataaagataccaggcgtttccccctggaagctccctcgtgcgctctcctgttccgaccctgccgcttaccggatacctgtccgcctttctcccttcgggaagcgtggcgctttctcatagctcacgctgtaggtatctcagttcggtgtaggtcgttcgctccaagctgggctgtgtgcacgaaccccccgttcagcccgaccgctgcgccttatccggtaactatcgtcttgagtccaacccggtaagacacgacttatcgccactggcagcagccactggtaacaggattagcagagcgaggtatgtaggcggtgctacagagttcttgaagtggtggcctaactacggctacactagaaggacagtatttggtatctgcgctctgctgaagccagttaccttcggaaaaagagttggtagctcttgatccggcaaacaaaccaccgctggtagcggtggtttttttgtttgcaagcagcagattacgcgcagaaaaaaaggatctcaagaagatcctttgatcttttctacggggtctgacgctcagtggaacgaaaactcacgttaagggattttggtcatgagattatcaaaaaggatcttcacctagatccttttaaattaaaaatgaagttttaaatcaatctaaagtatatatgagtaaacttggtctgacagttaccaatgcttaatcagtgaggcacctatctcagcgatctgtctatttcgttcatccatagttgcctgactccccgtcgtgtagataactacgatacgggagggcttaccatctggccccagtgctgcaatgataccgcgagacccacgctcaccggctccagatttatcagcaataaaccagccagccggaagggccgagcgcagaagtggtcctgcaactttatccgcctccatccagtctattaattgttgccgggaagctagagtaagtagttcgccagttaatagtttgcgcaacgttgttgccattgctacaggcatcgtggtgtcacgctcgtcgtttggtatggcttcattcagctccggttcccaacgatcaaggcgagttacatgatcccccatgttgtgcaaaaaagcggttagctccttcggtcctccgatcgttgtcagaagtaagttggccgcagtgttatcactcatggttatggcagcactgcataattctcttactgtcatgccatccgtaagatgcttttctgtgactggtgagtactcaaccaagtcattctgagaatagtgtatgcggcgaccgagttgctcttgcccggcgtcaatacgggataataccgcgccacatagcagaactttaaaagtgctcatcattggaaaacgttcttcggggcgaaaactctcaaggatcttaccgctgttgagatccagttcgatgtaacccactcgtgcacccaactgatcttcagcatcttttactttcaccagcgtttctgggtgagcaaaaacaggaaggcaaaatgccgcaaaaaagggaataagggcgacacggaaatgttgaatactcatactcttcctttttcaatattattgaagcatttatcagggttattgtctcatgagcggatacatatttgaatgtatttagaaaaataaacaaataggggttccgcgcacatttccccgaaaagtgccacctgacgtccgatcaaaaatcatcgcttcgctgattaattaccccagaaataaggctaaaaaactaatcgcattatcatcctatggttgttaatttgattcgttcatttgaaggtttgtggggccaggttactgccaatttttcctcttcataaccataaaagctagtattgtagaatctttattgttcggagcagtgcggcgcgaggcacatctgcgtttcaggaacgcgaccggtgaagacgaggacgcacggaggagagtcttccttcggagggctgtcacccgctcggcggcttctaatccgtacttcaatatagcaatgagcagttaagcgtattactgaaagttccaaagagaaggtttttttaggctaatcgacctcgagcagatccgccaggcgtgtatatagcgtggatggccaggcaactttagtgctgacacatacaggcatatatatatgtgtgcgacgacacatgatcatatggcatgcatgtgctctgtatgtatataaaactcttgttttcttcttttctctaaatattctttccttatacattaggtcctttgtagcataaattactatacttctatagacacgcaaacacaaatacacagcggccttgccaccatggccaagtctggcatctaccagattaagaacaccctgaataacaaagtgtatgttggatctgccaaggactttgagaaaagatggaagaggcacttcaaggatctggaaaagggttgccacagctccatcaagctccaaaggtctttcaacaaacatggcaatgtctttgagtgctccattttggaagagatcccttatgaaaaggacctcattatagagagggaaaacttctggatcaaggagctgaactcaaaaatcaatggatacaacattgcagatgccacatttggtgacacctgttctactcacccccttaaggaagagatcattaaaaagaggtctgagactgtgaaggctaagatgttgaaactggggcctgatggcagaaaggcactctactctaagccaggtagcaaaaatggaaggtggaaccctgagacccacaagttctgcaaatgtggggtgagaatacagacatcagcctacacttgcagcaagtgtaggaacagatcaggagagaataactcctttttcaaccacaagcattctcaaggtccatccggagtggatctacgcacgctcggctacagccagcagcaacaggagaagatcaaaccgaaggttcgttcgacagtggcgcagcaccacgaggcactggtcggccacgggtttacacacgcgcacatcgttgcgttaagccaacacccggcagcgttagggaccgtcgctgtcaagtatcaggacatgatcgcagcgttgccagaggcgacacacgaagcgatcgttggcgtcggcaaacagtggtccggcgcacgcgctctggaggccttgctcacggtggcgggagagttgagaggtccaccgttacagttggacacaggccaacttctcaagattgcaaaacgtggcggcgtgaccgcagtggaggcagtgcatgcatggcgcaatgcactgacgggtgccccgctcaacttgaccccggagcaggtggtggccatcgccagccacgatggcggcaagcaggcgctggagacggtccagcggctgttgccggtgctgtgccaggcccacggcttgaccccccagcaggtggtggccatcgccagcaatggcggtggcaagcaggcgctggagacggtccagcggctgttgccggtgctgtgccaggcccacggcttgaccccggagcaggtggtggccatcgccagcaatattggtggcaagcaggcgctggagacggtgcaggcgctgttgccggtgctgtgccaggcccacggcttgaccccccagcaggtggtggccatcgccagcaatggcggtggcaagcaggcgctggagacggtccagcggctgttgccggtgctgtgccaggcccacggcttgaccccggagcaggtggtggccatcgccagcaatattggtggcaagcaggcgctggagacggtgcaggcgctgttgccggtgctgtgccaggcccacggcttgaccccggagcaggtggtggccatcgccagcaatattggtggcaagcaggcgctggagacggtgcaggcgctgttgccggtgctgtgccaggcccacggcttgaccccggagcaggtggtggccatcgccagcaatattggtggcaagcaggcgctggagacggtgcaggcgctgttgccggtgctgtgccaggcccacggcttgaccccggagcaggtggtggccatcgccagccacgatggcggcaagcaggcgctggagacggtccagcggctgttgccggtgctgtgccaggcccacggcttgaccccggagcaggtggtggccatcgccagccacgatggcggcaagcaggcgctggagacggtccagcggctgttgccggtgctgtgccaggcccacggcttgaccccccagcaggtggtggccatcgccagcaatggcggtggcaagcaggcgctggagacggtccagcggctgttgccggtgctgtgccaggcccacggcttgaccccggagcaggtggtggccatcgccagcaatattggtggcaagcaggcgctggagacggtgcaggcgctgttgccggtgctgtgccaggcccacggcttgaccccggagcaggtggtggccatcgccagcaatattggtggcaagcaggcgctggagacggtgcaggcgctgttgccggtgctgtgccaggcccacggcttgaccccggagcaggtggtggccatcgccagccacgatggcggcaagcaggcgctggagacggtccagcggctgttgccggtgctgtgccaggcccacggcttgaccccggagcaggtggtggccatcgccagccacgatggcggcaagcaggcgctggagacggtccagcggctgttgccggtgctgtgccaggcccacggcttgaccccggagcaggtggtggccatcgccagccacgatggcggcaagcaggcgctggagacggtccagcggctgttgccggtgctgtgccaggcccacggcttgaccccccagcaggtggtggccatcgccagcaatggcggtggcaagcaggcgctggagacggtccagcggctgttgccggtgctgtgccaggcccacggcttgaccccggagcaggtggtggccatcgccagccacgatggcggcaagcaggcgctggagacggtccagcggctgttgccggtgctgtgccaggcccacggcttgacccctcagcaggtggtggccatcgccagcaatggcggcggcaggccggcgctggagagcattgttgcccagttatctcgccctgatccgggatccaagtctggcatctaccagattaagaacaccctgaataacaaagtgtatgttggatctgccaaggactttgagaaaagatggaagaggcacttcaaggatctggaaaagggttgccacagctccatcaagctccaaaggtctttcaacaaacatggcaatgtctttgagtgctccattttggaagagatcccttatgaaaaggacctcattatagagagggaaaacttctggatcaaggagctgaactcaaaaatcaatggatacaacattgcagatgccacatttggtgacacctgttctactcacccccttaaggaagagatcattaaaaagaggtctgagactgtgaaggctaagatgttgaaactggggcctgatggcagaaaggcactctactctaagccaggtagcaaaaatggaaggtggaaccctgagacccacaagttctgcaaatgtggggtgagaatacagacatcagcctacacttgcagcaagtgtaggaacagatcaggagagaataactcctttttcaaccacaagcattctcaaggtccatcggccgactgataactcgagcgatcctctagacgagctcctcgagcctgcagcagctgaagctttggacttcttcgccagaggtttggtcaagtctccaatcaaggttgtcggcttgtctaccttgccagaaatttacgaaaagatggaaaagggtcaaatcgttggtagatacgttgttgacacttctaaataagcgaatttcttatgatttatgatttttattattaaataagttataaaaaaaataagtgtatacaaattttaaagtgactcttaggttttaaaacgaaaattcttattcttgagtaactctttcctgtaggtcaggttgctttctcaggtatagcatgaggtcgctcttattgaccacacctctaccggcatgcaagcttggcgtaatcatggtcatagctgtttcctgtgtgaaattgttatccgctcacaattccacacaacatacgagccggaagcataaagtgtaaagcctggggtgcctaatgagtgagctaactcacattaattgcgttgcgctcactgcccgctttccagtcgggaaacctgtcgtgccagcagatctattacattatgggtggtatgttggaataaaaatcaactatcatctactaactagtatttacgttactagtatattatcatatacggtgttagaagatgacgcaaatgatgagaaatagtcatctaaattagtggaagctgaaacgcaaggattgataatgtaataggatcaatgaatattaacatataaaatgatgataataatatttatagaattgtgtagaattgcagattcccttttatggattcctaaatcctcgaggagaacttctagtatatctacatacctaatattattgccttattaaaaatggaatcccaacaattacatcaaaatccacattctcttcaaaatcaattgtcctgtacttccttgttcatgtgtgttcaaaaacgttatatttataggataattatactctatttctcaacaagtaattggttgtttggccgagcggtctaaggcgcctgattcaagaaatatcttgaccgcagttaactgtgggaatactcaggtatcgtaagatgcaagagttcgaatctcttagcaaccattatttttttcctcaacataacgagaacacacaggggcgctatcgcacagaatcaaattcgatgactggaaattttttgttaatttcagaggtcgcctgacgcatatacctttttcaactgaaaaattgggagaaaaaggaaaggtgagagccgcggaaccggcttttcatatagaatagagaagcgttcatgactaaatgcttgcatcacaatacttgaagttgacaatattatttaaggacctattgttttttccaataggtggttagcaatcgtcttactttctaacttttcttaccttttacatttcagcaatatatatatatatatttcaaggatataccattctaatgtctgcccctaagaagatcgtcgttttgccaggtgaccacgttggtcaagaaatcacagccgaagccattaaggttcttaaagctatttctgatgttcgttccaatgtcaagttcgatttcgaaaatcatttaattggtggtgctgctatcgatgctacaggtgtcccacttccagatgaggcgctggaagcctccaagaaggttgatgccgttttgttaggtgctgtgggtggtcctaaatggggtaccggtagtgttagacctgaacaaggtttactaaaaatccgtaaagaacttcaattgtacgccaacttaagaccatgtaactttgcatccgactctcttttagacttatctccaatcaagccacaatttgctaaaggtactgacttcgttgttgtcagagaattagtgggaggtatttactttggtaagagaaaggaagacgatggtgatggtgtcgcttgggatagtgaacaatacaccgttccagaagtgcaaagaatcacaagaatggccgctttcatggccctacaacatgagccaccattgcctatttggtccttggataaagctaatgttttggcctcttcaagattatggagaaaaactgtggaggaaaccatcaagaacgaattccctacattgaaggttcaacatcaattgattgattctgccgccatgatcctagttaagaacccaacccacctaaatggtattataatcaccagcaacatgtttggtgatatcatctccgatgaagcctccgttatcccaggttccttgggtttgttgccatctgcgtccttggcctctttgccagacaagaacaccgcatttggtttgtacgaaccatgccacggttctgctccagatttgccaaagaataaggtcaaccctatcgccactatcttgtctgctgcaatgatgttgaaattgtcattgaacttgcctgaagaaggtaaggccattgaagatgcagttaaaaaggttttggatgcaggtatcagaactggtgatttaggtggttccaacagtaccacggaagtcggtgatgctgtcgccgaagaagttaagaaaatccttgcttaaaaagattctctttttttatgatatttgtacataaactttataaatgaaattcataatagaaacgacacgaaattacaaaatggaatatgttcatagggtagacgaaactatatacgcaatctacatacatttatcaagaaggagaaaaaggaggatgtaaaggaatacaggtaagcaaattgatactaatggctcaacgtgataaggaaaaagaattgcactttaacattaatattgacaaggaggagggcaccacacaaaaagttaggtgtaacagaaaatcatgaaactatgattcctaatttatatattggaggattttctctaaaaaaaaaaaaatacaacaaataaaaaacactcaatgacctgaccatttgatggagtttaagtcaataccttcttgaaccatttcccataatggtgaaagttccctcaagaattttactctgtcagaaacggccttaacgacgtagtcgacctcctcttcagtactaaatctaccaataccaaatctgatggaagaatgggctaatgcatcatccttacccagcgcatgtaaaacataagaaggttctagggaagcagatgtacaggctgaacccgaggataatgcgatatcccttagtgccatcaataaagattctccttccacgtaggcgaaagaaacgttaacacaccctggataacgatgatctggagatccgttcaacgtggtatgttcagcggataatagacctttgactaatttatcggatagtcttttgatgtgagcttggtcgttgtcaaattctttcttcatcaatctcgcagcttcaccaaatcccgctaccaatgggggggccaaagtaccagatctgctgcattaatgaatcggccaacgcgcggggagaggcggtttgcgtattgggcgctcttccgcttcctcgctcactgactcgctgcgctcggtcgttcggctgcggcgagcggtatcagcatcgatgaattccacggactatagactatactagtatactccgtctactgtacgatacacttccgctcaggtccttgtcctttaacgaggccttaccactcttttgttactctattgatccagctcagcaaaggcagtgtgatctaagattctatcttcgcgatgtagtaaaactagctagaccgagaaagagactagaaatgcaaaaggcacttctacaatggctgccatcattattatccgatgtgacgctgcagcttctcaatgatattcgaatacgctttgaggagatacagcctaatatccgacaaactgttttacagatttacgatcgtacttgttacccatcattgaattttgaacatccgaacctgggagttttccctgaaacagatagtatatttgaacctgtataataatatatagtctagcgctttacggaagacaatgtatgtatttcggttcctggagaaactattgcatctattgcataggtaatcttgcacgtcgcatccccggttcattttctgcgtttccatcttgcacttcaatagcatatctttgttaacgaagcatctgtgcttcattttgtagaacaaaaatgcaacgcgagagcgctaatttttcaaacaaagaatctgagctgcatttttacagaacagaaatgcaacgcgaaagcgctattttaccaacgaagaatctgtgcttcatttttgtaaaacaaaaatgcaacgcgagagcgctaatttttcaaacaaagaatctgagctgcatttttacagaacagaaatgcaacgcgagagcgctattttaccaacaaagaatctatacttcttttttgttctacaaaaatgcatcccgagagcgctatttttctaacaaagcatcttagattactttttttctcctttgtgcgctctataatgcagtctcttgataactttttgcactgtaggtccgttaaggttagaagaaggctactttggtgtctattttctcttccataaaaaaagcctgactccacttcccgcgtttactgattactagcgaagctgcgggtgcattttttcaagataaaggcatccccgattatattctataccgatgtggattgcgcatactttgtgaacagaaagtgatagcgttgatgattcttcattggtcagaaaattatgaacggtttcttctattttgtctctatatactacgtataggaaatgtttacattttcgtattgttttcgattcactctatgaatagttcttactacaatttttttgtctaaagagtaatactagagataaacataaaaaatgtagaggtcgagtttagatgcaagttcaaggagcgaaaggtggatgggtaggttatatagggatatagcacagagatatatagcaaagagatacttttgagcaatgtttgtggaagcggtattcgcaatattttagtagctcgttacagtccggtgcgtttttggttttttgaaagtgcgtcttcagagcgcttttggttttcaaaagcgctctgaagttcctatactttctagagaataggaacttcggaataggaacttcaaagcgtttccgaaaacgagcgcttccgaaaatgcaacgcgagctgcgcacatacagctcactgttcacgtcgcacctatatctgcgtgttgcctgtatatatatatacatgagaagaacggcatagtgcgtgtttatgcttaaatgcgtacttatatgcgtctatttatgtaggatgaaaggtagtctagtacctcctgtgatattatcccattccatgcggggtatcgtatgcttccttcagcactaccctttagctgttctatatgctgccactcctcaattggattagtctcatccttcaatgctatcatttcctttgatattggatcatatgcatagtaccgagaaactagtgcgaagtagtgatcaggtattgctgttatctgatgagtatacgttgtcctggccacggcagaagcacgcttatcgctccaatttcccacaacattagtcaactccgttaggcccttcattgaaagaaatgaggtcatcaaatgtcttccaatgtgagattttgggccattttttatagcaaagattgaataaggcgcatttttcttcaaagctttattgtacgatctgactaagttatcttttaataattggtattcctgtttattgcttgaagaattgccggtcctatttactcgttttaggactggttcagaattcatcgatgctcactcaaaggtcggtaatacggttatccacagaatcaggggataacgcaggaaagaac

SEQ ID NO: 356 - DNA, 4967 bp, Artificial sequence
  pCLS15798
ggtctttcctgcgttatcccctgattctgtggataaccgtattaccgcctttgagtgagctgataccgctcgccgcagccgaacgaccgagcgcagcgagtcagtgagcgaggaagcggagagcgcccaatacgcaaaccgcctctccccgcgcgttggccgattcattaatgcagctggcacgacaggtttcccgactggaaagcgggcagtgagcgcaacgcaattaatgtgagttagctcactcattaggcaccccaggctttacactttatgcttccggctcgtatgttgtgtggaattgtgagcggataacaatttcacacaggaaacagctatgaccatgattacgccaagcgcgtcaattaaccctcactaaagggaacaaaagctgttaattaagcgcgccacacgcaaacacaaatacacagcggccttgccaccatgggttccgaggcaccccgggccgagacctttgtcttcctggacctggaagccactgggctccccagtgtggagcccgagattgccgagctgtccctctttgctgtccaccgctcctccctggagaacccggagcacgacgagtctggtgccctagtattgccccgggtcctggacaagctcacgctgtgcatgtgcccggagcgccccttcactgccaaggccagcgagatcaccggcctgagcagtgagggcctggcgcgatgccggaaggctggctttgatggcgccgtggtgcggacgctgcaggccttcctgagccgccaggcagggcccatctgccttgtggcccacaatggctttgattatgatttccccctgctgtgtgccgagctgcggcgcctgggtgcccgcctgccccgggacactgtctgcctggacacgctgccggccctgcggggcctggaccgcgcccacagccacggcacccgggcccggggccgccagggttacagcctcggcagcctcttccaccgctacttccgggcagagccaagcgcagcccactcagccgagggcgacgtgcacaccctgctcctgatcttcctgcaccgcgccgcagagctgctcgcctgggccgatgagcaggcccgtgggtgggcccacatcgagcccatgtacttgccgcctgatgaccccagcctggaggcgactcctccacagaccggtctggatgttccttactccgaggcaccccgggccgagacctttgtcttcctggacctggaagccactgggctccccagtgtggagcccgagattgccgagctgtccctctttgctgtccaccgctcctccctggagaacccggagcacgacgagtctggtgccctagtattgccccgggtcctggacaagctcacgctgtgcatgtgcccggagcgccccttcactgccaaggccagcgagatcaccggcctgagcagtgagggcctggcgcgatgccggaaggctggctttgatggcgccgtggtgcggacgctgcaggccttcctgagccgccaggcagggcccatctgccttgtggcccacaatggctttgattatgatttccccctgctgtgtgccgagctgcggcgcctgggtgcccgcctgccccgggacactgtctgcctggacacgctgccggccctgcggggcctggaccgcgcccacagccacggcacccgggcccggggccgccagggttacagcctcggcagcctcttccaccgctacttccgggcagagccaagcgcagcccactcagccgagggcgacgtgcacaccctgctcctgatcttcctgcaccgcgccgcagagctgctcgcctgggccgatgagcaggcccgtgggtgggcccacatcgagcccatgtacttgccgcctgatgaccccagcctggaggcgggaggtggaggttctggaggtggaggatcctccggagtggatctacgcacgctcggctacagccagcagcaacaggagaagatcaaaccgaaggttcgttcgacagtggcgcagcaccacgaggcactggtcggccacgggtttacacacgcgcacatcgttgcgttaagccaacacccggcagcgttagggaccgtcgctgtcaagtatcaggacatgatcgcagcgttgccagaggcgacacacgaagcgatcgttggcgtcggcaaacagtggtccggcgcacgcgctctggaggccttgctcacggtggcgggagagttgagaggtccaccgttacagttggacacaggccaacttctcaagattgcaaaacgtggcggcgtgaccgcagtggaggcagtgcatgcatggcgcaatgcactgacgggtgccccgctcaacttgaccggagacgcccgggggatcaggtcacgtgcgtctcggagcattgttgcccagttatctcgccctgatccgtcggccgactgataagtcgaccaccaccaccaccaccactgataagagctcctcgagcctgcagcagctgaagctttggacttctggcgcgcccaattcgccctatagtgagtcgtattacgtcgcgctcactggccgtcgttttacaacgtcgtgactgggaaaaccctggcgttacccaacttaatcgccttgcagcacatccccctttcgccagctggcgtaatagcgaagaggcccgcaccgaaacgcccttcccaacagttgcgcagcctgaatggcgaatgggagcgccctgtagcggcgcattaagcgcggcgggtgtggtggttacgcgcagcgtgaccgctacacttgccagcgccctagcgcccgctcctttcgctttcttcccttcctttctcgccacgttcgccggctttccccgtcaagctctaaatcgggggctccctttagggttccgatttagtgctttacggcacctcgaccccaaaaaacttgattagggtgatggttggcctgtagtgggccatagccctgatagacggtttttcgccctttgacgttggagtccacgttctttaatagtggactcttgttccaaactggaacaacactcaaccctatctcggtctattcttttgatttataagggattttgccgatttcggcctattggttaaaaaatgagctgatttaacaaaaatttaacgcgaattttaacaaaatattaacgcttacaatttaggtggcacttttcggggaaatgtgcgcggaacccctatttgtttatttttctaaatacattcaaatatgtatccgctcatgagacaataaccctgataaatgcttcaataatattgaaaaaggaagagtatgagtattcaacatttccgtgtcgcccttattcccttttttgcggcattttgccttcctgtttttgctcacccagaaacgctggtgaaagtaaaagatgctgaagatcagttgggtgcacgagtgggttacatcgaactggatctcaacagcggtaagatccttgagagttttcgccccgaagaacgttttccaatgatgagcacttttaaagttctgctatgtggcgcggtattatcccgtattgacgccgggcaagagcaactcggtcgccgcatacactattctcagaatgacttggttgagtactcaccagtcacagaaaagcatcttacggatggcatgacagtaagagaattatgcagtgctgccataaccatgagtgataacactgcggccaacttacttctgacaacgatcggaggaccgaaggagctaaccgcttttttgcacaacatgggggatcatgtaactcgccttgatcgttgggaaccggagctgaatgaagccataccaaacgacgagcgtgacaccacgatgcctgtagcaatggcaacaacgttgcgcaaactattaactggcgaactacttactctagcttcccggcaacaattaatagactggatggaggcggataaagttgcaggaccacttctgcgctcggcccttccggctggctggtttattgctgataaatctggagccggtgagcgtggttctcgcggtatcattgcagcactggggccagatggtaagccctcccgtatcgtagttatctacacgacggggagtcaggcaactatggatgaacgaaatagacagatcgctgagataggtgcctcactgattaagcattggtaactgtcagaccaagtttactcatatatactttagattgatttaaaacttcatttttaatttaaaaggatctaggtgaagatcctttttgataatctcatgaccaaaatcccttaacgtgagttttcgttccactgagcgtcagaccccgtagaaaagatcaaaggatcttcttgagatcctttttttctgcgcgtaatctgctgcttgcaaacaaaaaaaccaccgctaccagcggtggtttgtttgccggatcaagagctaccaactctttttccgaaggtaactggcttcagcagagcgcagataccaaatactgttcttctagtgtagccgtagttaggccaccacttcaagaactctgtagcaccgcctacatacctcgctctgctaatcctgttaccagtggctgctgccagtggcgataagtcgtgtcttaccgggttggactcaagacgatagttaccggataaggcgcagcggtcgggctgaacggggggttcgtgcacacagcccagcttggagcgaacgacctacaccgaactgagatacctacagcgtgagctatgagaaagcgccacgcttcccgaagggagaaaggcggacaggtatccggtaagcggcagggtcggaacaggagagcgcacgagggagcttccagggggaaacgcctggtatctttatagtcctgtcgggtttcgccacctctgacttgagcgtcgatttttgtgatgctcgtcaggggggcggagcctatggaaaaacgccagcaacgcggcctttttacggttcctggccttttgctggccttttgctcacat

SEQ ID NO: 357 - DNA, 7346 bp, Artificial sequence
  pCLS15799
ggtctttcctgcgttatcccctgattctgtggataaccgtattaccgcctttgagtgagctgataccgctcgccgcagccgaacgaccgagcgcagcgagtcagtgagcgaggaagcggagagcgcccaatacgcaaaccgcctctccccgcgcgttggccgattcattaatgcagctggcacgacaggtttcccgactggaaagcgggcagtgagcgcaacgcaattaatgtgagttagctcactcattaggcaccccaggctttacactttatgcttccggctcgtatgttgtgtggaattgtgagcggataacaatttcacacaggaaacagctatgaccatgattacgccaagcgcgtcaattaaccctcactaaagggaacaaaagctgttaattaagcgcgccacacgcaaacacaaatacacagcggccttgccaccatgggttccgaggcaccccgggccgagacctttgtcttcctggacctggaagccactgggctccccagtgtggagcccgagattgccgagctgtccctctttgctgtccaccgctcctccctggagaacccggagcacgacgagtctggtgccctagtattgccccgggtcctggacaagctcacgctgtgcatgtgcccggagcgccccttcactgccaaggccagcgagatcaccggcctgagcagtgagggcctggcgcgatgccggaaggctggctttgatggcgccgtggtgcggacgctgcaggccttcctgagccgccaggcagggcccatctgccttgtggcccacaatggctttgattatgatttccccctgctgtgtgccgagctgcggcgcctgggtgcccgcctgccccgggacactgtctgcctggacacgctgccggccctgcggggcctggaccgcgcccacagccacggcacccgggcccggggccgccagggttacagcctcggcagcctcttccaccgctacttccgggcagagccaagcgcagcccactcagccgagggcgacgtgcacaccctgctcctgatcttcctgcaccgcgccgcagagctgctcgcctgggccgatgagcaggcccgtgggtgggcccacatcgagcccatgtacttgccgcctgatgaccccagcctggaggcgactcctccacagaccggtctggatgttccttactccgaggcaccccgggccgagacctttgtcttcctggacctggaagccactgggctccccagtgtggagcccgagattgccgagctgtccctctttgctgtccaccgctcctccctggagaacccggagcacgacgagtctggtgccctagtattgccccgggtcctggacaagctcacgctgtgcatgtgcccggagcgccccttcactgccaaggccagcgagatcaccggcctgagcagtgagggcctggcgcgatgccggaaggctggctttgatggcgccgtggtgcggacgctgcaggccttcctgagccgccaggcagggcccatctgccttgtggcccacaatggctttgattatgatttccccctgctgtgtgccgagctgcggcgcctgggtgcccgcctgccccgggacactgtctgcctggacacgctgccggccctgcggggcctggaccgcgcccacagccacggcacccgggcccggggccgccagggttacagcctcggcagcctcttccaccgctacttccgggcagagccaagcgcagcccactcagccgagggcgacgtgcacaccctgctcctgatcttcctgcaccgcgccgcagagctgctcgcctgggccgatgagcaggcccgtgggtgggcccacatcgagcccatgtacttgccgcctgatgaccccagcctggaggcgggaggtggaggttctggaggtggaggatcctccggagtggatctacgcacgctcggctacagccagcagcaacaggagaagatcaaaccgaaggttcgttcgacagtggcgcagcaccacgaggcactggtcggccacgggtttacacacgcgcacatcgttgcgttaagccaacacccggcagcgttagggaccgtcgctgtcaagtatcaggacatgatcgcagcgttgccagaggcgacacacgaagcgatcgttggcgtcggcaaacagtggtccggcgcacgcgctctggaggccttgctcacggtggcgggagagttgagaggtccaccgttacagttggacacaggccaacttctcaagattgcaaaacgtggcggcgtgaccgcagtggaggcagtgcatgcatggcgcaatgcactgacgggtgccccgctcaacttgaccccggagcaggtggtggccatcgccagccacgatggcggcaagcaggcgctggagacggtccagcggctgttgccggtgctgtgccaggcccacggcttgaccccccagcaggtggtggccatcgccagcaatggcggtggcaagcaggcgctggagacggtccagcggctgttgccggtgctgtgccaggcccacggcttgaccccggagcaggtggtggccatcgccagcaatattggtggcaagcaggcgctggagacggtgcaggcgctgttgccggtgctgtgccaggcccacggcttgaccccccagcaggtggtggccatcgccagcaatggcggtggcaagcaggcgctggagacggtccagcggctgttgccggtgctgtgccaggcccacggcttgaccccggagcaggtggtggccatcgccagcaatattggtggcaagcaggcgctggagacggtgcaggcgctgttgccggtgctgtgccaggcccacggcttgaccccggagcaggtggtggccatcgccagcaatattggtggcaagcaggcgctggagacggtgcaggcgctgttgccggtgctgtgccaggcccacggcttgaccccggagcaggtggtggccatcgccagcaatattggtggcaagcaggcgctggagacggtgcaggcgctgttgccggtgctgtgccaggcccacggcttgaccccggagcaggtggtggccatcgccagccacgatggcggcaagcaggcgctggagacggtccagcggctgttgccggtgctgtgccaggcccacggcttgaccccggagcaggtggtggccatcgccagccacgatggcggcaagcaggcgctggagacggtccagcggctgttgccggtgctgtgccaggcccacggcttgaccccccagcaggtggtggccatcgccagcaatggcggtggcaagcaggcgctggagacggtccagcggctgttgccggtgctgtgccaggcccacggcttgaccccggagcaggtggtggccatcgccagcaatattggtggcaagcaggcgctggagacggtgcaggcgctgttgccggtgctgtgccaggcccacggcttgaccccggagcaggtggtggccatcgccagcaatattggtggcaagcaggcgctggagacggtgcaggcgctgttgccggtgctgtgccaggcccacggcttgaccccggagcaggtggtggccatcgccagccacgatggcggcaagcaggcgctggagacggtccagcggctgttgccggtgctgtgccaggcccacggcttgaccccggagcaggtggtggccatcgccagccacgatggcggcaagcaggcgctggagacggtccagcggctgttgccggtgctgtgccaggcccacggcttgaccccggagcaggtggtggccatcgccagccacgatggcggcaagcaggcgctggagacggtccagcggctgttgccggtgctgtgccaggcccacggcttgaccccccagcaggtggtggccatcgccagcaatggcggtggcaagcaggcgctggagacggtccagcggctgttgccggtgctgtgccaggcccacggcttgaccccggagcaggtggtggccatcgccagccacgatggcggcaagcaggcgctggagacggtccagcggctgttgccggtgctgtgccaggcccacggcttgacccctcagcaggtggtggccatcgccagcaatggcggcggcaggccggcgctggagagcattgttgcccagttatctcgccctgatccgggatcctccggaccgaacagaggcgttaccaagcaactagttaaatccgaactggaagagaaaaagtccgagttgcgtcataaactgaagtacgttccacatgaatacattgaactgatcgagattgcccgtaacagcacccaggacagaatcctggaaatgaaagtgatggagtttttcatgaaagtgtacggctacagaggcaaacatttgggcggtagccgtaaaccggatggtgccatctacaccgttggcagcccgatcgattacggcgtgatcgttgataccaaagcctactccggtggctacaacctgccgattggccaggctgacgaaatgcagagatacgtggaagagaaccagactcgtaacaagcatatcaacccgaacgaatggtggaaagtctacccgagttccgtgactgagttcaaatttctgtttgtgagcggccatttcaaaggcaactacaaagcccagctgaccagactgaaccatatcaccaactgcaacggtgccgtcttgagcgtggaagaactgttgattggtggcgaaatgatcaaggctggcaccctgactctggaggaagttagacgtaaattcaacaacggtgaaatcaactttggatcctcggccgactgataagtcgaccaccaccaccaccaccactgataagagctcctcgagcctgcagcagctgaagctttggacttctggcgcgcccaattcgccctatagtgagtcgtattacgtcgcgctcactggccgtcgttttacaacgtcgtgactgggaaaaccctggcgttacccaacttaatcgccttgcagcacatccccctttcgccagctggcgtaatagcgaagaggcccgcaccgaaacgcccttcccaacagttgcgcagcctgaatggcgaatgggagcgccctgtagcggcgcattaagcgcggcgggtgtggtggttacgcgcagcgtgaccgctacacttgccagcgccctagcgcccgctcctttcgctttcttcccttcctttctcgccacgttcgccggctttccccgtcaagctctaaatcgggggctccctttagggttccgatttagtgctttacggcacctcgaccccaaaaaacttgattagggtgatggttggcctgtagtgggccatagccctgatagacggtttttcgccctttgacgttggagtccacgttctttaatagtggactcttgttccaaactggaacaacactcaaccctatctcggtctattcttttgatttataagggattttgccgatttcggcctattggttaaaaaatgagctgatttaacaaaaatttaacgcgaattttaacaaaatattaacgcttacaatttaggtggcacttttcggggaaatgtgcgcggaacccctatttgtttatttttctaaatacattcaaatatgtatccgctcatgagacaataaccctgataaatgcttcaataatattgaaaaaggaagagtatgagtattcaacatttccgtgtcgcccttattcccttttttgcggcattttgccttcctgtttttgctcacccagaaacgctggtgaaagtaaaagatgctgaagatcagttgggtgcacgagtgggttacatcgaactggatctcaacagcggtaagatccttgagagttttcgccccgaagaacgttttccaatgatgagcacttttaaagttctgctatgtggcgcggtattatcccgtattgacgccgggcaagagcaactcggtcgccgcatacactattctcagaatgacttggttgagtactcaccagtcacagaaaagcatcttacggatggcatgacagtaagagaattatgcagtgctgccataaccatgagtgataacactgcggccaacttacttctgacaacgatcggaggaccgaaggagctaaccgcttttttgcacaacatgggggatcatgtaactcgccttgatcgttgggaaccggagctgaatgaagccataccaaacgacgagcgtgacaccacgatgcctgtagcaatggcaacaacgttgcgcaaactattaactggcgaactacttactctagcttcccggcaacaattaatagactggatggaggcggataaagttgcaggaccacttctgcgctcggcccttccggctggctggtttattgctgataaatctggagccggtgagcgtggttctcgcggtatcattgcagcactggggccagatggtaagccctcccgtatcgtagttatctacacgacggggagtcaggcaactatggatgaacgaaatagacagatcgctgagataggtgcctcactgattaagcattggtaactgtcagaccaagtttactcatatatactttagattgatttaaaacttcatttttaatttaaaaggatctaggtgaagatcctttttgataatctcatgaccaaaatcccttaacgtgagttttcgttccactgagcgtcagaccccgtagaaaagatcaaaggatcttcttgagatcctttttttctgcgcgtaatctgctgcttgcaaacaaaaaaaccaccgctaccagcggtggtttgtttgccggatcaagagctaccaactctttttccgaaggtaactggcttcagcagagcgcagataccaaatactgttcttctagtgtagccgtagttaggccaccacttcaagaactctgtagcaccgcctacatacctcgctctgctaatcctgttaccagtggctgctgccagtggcgataagtcgtgtcttaccgggttggactcaagacgatagttaccggataaggcgcagcggtcgggctgaacggggggttcgtgcacacagcccagcttggagcgaacgacctacaccgaactgagatacctacagcgtgagctatgagaaagcgccacgcttcccgaagggagaaaggcggacaggtatccggtaagcggcagggtcggaacaggagagcgcacgagggagcttccagggggaaacgcctggtatctttatagtcctgtcgggtttcgccacctctgacttgagcgtcgatttttgtgatgctcgtcaggggggcggagcctatggaaaaacgccagcaacgcggcctttttacggttcctggccttttgctggccttttgctcacat

SEQ ID NO: 358 - DNA, 10967 bp, Artificial sequence
  pCLS14972
atgtgagcaaaaggccagcaaaaggccaggaaccgtaaaaaggccgcgttgctggcgtttttccataggctccgcccccctgacgagcatcacaaaaatcgacgctcaagtcagaggtggcgaaacccgacaggactataaagataccaggcgtttccccctggaagctccctcgtgcgctctcctgttccgaccctgccgcttaccggatacctgtccgcctttctcccttcgggaagcgtggcgctttctcatagctcacgctgtaggtatctcagttcggtgtaggtcgttcgctccaagctgggctgtgtgcacgaaccccccgttcagcccgaccgctgcgccttatccggtaactatcgtcttgagtccaacccggtaagacacgacttatcgccactggcagcagccactggtaacaggattagcagagcgaggtatgtaggcggtgctacagagttcttgaagtggtggcctaactacggctacactagaagaacagtatttggtatctgcgctctgctgaagccagttaccttcggaaaaagagttggtagctcttgatccggcaaacaaaccaccgctggtagcggtttttttgtttgcaagcagcagattacgcgcagaaaaaaaggatctcaagaagatcctttgatcttttctacggggtctgacgctcagtggaacgaaaactcacgttaagggattttggtcatgagattatcaaaaaggatcttcacctagatccttttaaattaaaaatgaagttttaaatcaatctaaagtatatatgagtaaacttggtctgacagttaccaatgcttaatcagtgaggcacctatctcagcgatctgtctatttcgttcatccatagttgcctgactccccgtcgtgtagataactacgatacgggagggcttaccatctggccccagtgctgcaatgataccgcgagacccacgctcaccggctccagatttatcagcaataaaccagccagccggaagggccgagcgcagaagtggtcctgcaactttatccgcctccatccagtctattaattgttgccgggaagctagagtaagtagttcgccagttaatagtttgcgcaacgttgttgccattgctacaggcatcgtggtgtcacgctcgtcgtttggtatggcttcattcagctccggttcccaacgatcaaggcgagttacatgatcccccatgttgtgcaaaaaagcggttagctccttcggtcctccgatcgttgtcagaagtaagttggccgcagtgttatcactcatggttatggcagcactgcataattctcttactgtcatgccatccgtaagatgcttttctgtgactggtgagtactcaaccaagtcattctgagaatagtgtatgcggcgaccgagttgctcttgcccggcgtcaatacgggataataccgcgccacatagcagaactttaaaagtgctcatcattggaaaacgttcttcggggcgaaaactctcaaggatcttaccgctgttgagatccagttcgatgtaacccactcgtgcacccaactgatcttcagcatcttttactttcaccagcgtttctgggtgagcaaaaacaggaaggcaaaatgccgcaaaaaagggaataagggcgacacggaaatgttgaatactcatactcttcctttttcaatattattgaagcatttatcagggttattgtctcatgagcggatacatatttgaatgtatttagaaaaataaacaaataggggttccgcgcacatttccccgaaaagtgccacctgacgtcgacggatcgggagatctcccgatcccctatggtgcactctcagtacaatctgctctgatgccgcatagttaagccagtatctgctccctgcttgtgtgttggaggtcgctgagtagtgcgcgagcaaaatttaagctacaacaaggcaaggcttgaccgacaattgcatgaagaatctgcttagggttaggcgttttgcgctgcttcgcgatgtacgggccagatatacgcgttgacattgattattgactagttattaatagtaatcaattacggggtcattagttcatagcccatatatggagttccgcgttacataacttacggtaaatggcccgcctggctgaccgcccaacgacccccgcccattgacgtcaataatgacgtatgttcccatagtaacgccaatagggactttccattgacgtcaatgggtggagtatttacggtaaactgcccacttggcagtacatcaagtgtatcatatgccaagtacgccccctattgacgtcaatgacggtaaatggcccgcctggcattatgcccagtacatgaccttatgggactttcctacttggcagtacatctacgtattagtcatcgctattaccatggtgatgcggttttggcagtacatcaatgggcgtggatagcggtttgactcacggggatttccaagtctccaccccattgacgtcaatgggagtttgttttggcaccaaaatcaacgggactttccaaaatgtcgtaacaactccgccccattgacgcaaatgggcggtaggcgtgtacggtgggaggtctatataagcagagctctctggctaactagagaacccactgcttactggcttatcgaaatgaattcgactcactgttgggagacccaagctggctagttaagctatcacaagtttgtacaaaaaagcaggctggcgcgcccaattcgccctatagtgagtcgtattacgtcgcgctcactggccgtcgttttacaacgtcgtgactgggaaaaccctggcgttacccaacttaatcgccttgcagcacatccccctttcgccagctggcgtaatagcgaagaggcccgcaccgaaacgcccttcccaacagttgcgcagcctgaatggcgaatgggagcgccctgtagcggcgcattaagcgcggcgggtgtggtggttacgcgcagcgtgaccgctacacttgccagcgccctagcgcccgctcctttcgctttcttcccttcctttctcgccacgttcgccggctttccccgtcaagctctaaatcgggggctccctttagggttccgatttagtgctttacggcacctcgaccccaaaaaacttgattagggtgatggttggcctgtagtgggccatagccctgatagacggtttttcgccctttgacgttggagtccacgttctttaatagtggactcttgttccaaactggaacaacactcaaccctatctcggtctattcttttgatttataagggattttgccgatttcggcctattggttaaaaaatgagctgatttaacaaaaatttaacgcgaattttaacaaaatattaacgcttacaatttaggtggcacttttcggggaaatgtgcgcggaacccctatttgtttatttttctaaatacattcaaatatgtatccgctcatgagacaataaccctgataaatgcttcaataatattgaaaaaggaagagtatgagtattcaacatttccgtgtcgcccttattcccttttttgcggcattttgccttcctgtttttgctcacccagaaacgctggtgaaagtaaaagatgctgaagatcagttgggtgcacgagtgggttacatcgaactggatctcaacagcggtaagatccttgagagttttcgccccgaagaacgttttccaatgatgagcacttttaaagttctgctatgtggcgcggtattatcccgtattgacgccgggcaagagcaactcggtcgccgcatacactattctcagaatgacttggttgagtactcaccagtcacagaaaagcatcttacggatggcatgacagtaagagaattatgcagtgctgccataaccatgagtgataacactgcggccaacttacttctgacaacgatcggaggaccgaaggagctaaccgcttttttgcacaacatgggggatcatgtaactcgccttgatcgttgggaaccggagctgaatgaagccataccaaacgacgagcgtgacaccacgatgcctgtagcaatggcaacaacgttgcgcaaactattaactggcgaactacttactctagcttcccggcaacaattaatagactggatggaggcggataaagttgcaggaccacttctgcgctcggcccttccggctggctggtttattgctgataaatctggagccggtgagcgtggttctcgcggtatcattgcagcactggggccagatggtaagccctcccgtatcgtagttatctacacgacggggagtcaggcaactatggatgaacgaaatagacagatcgctgagataggtgcctcactgattaagcattggtaactgtcagaccaagtttactcatatatactttagattgatttaaaacttcatttttaatttaaaaggatctaggtgaagatcctttttgataatctcatgaccaaaatcccttaacgtgagttttcgttccactgagcgtcagaccccgtagaaaagatcaaaggatcttcttgagatcctttttttctgcgcgtaatctgctgcttgcaaacaaaaaaaccaccgctaccagcggtggtttgtttgccggatcaagagctaccaactctttttccgaaggtaactggcttcagcagagcgcagataccaaatactgttcttctagtgtagccgtagttaggccaccacttcaagaactctgtagcaccgcctacatacctcgctctgctaatcctgttaccagtggctgctgccagtggcgataagtcgtgtcttaccgggttggactcaagacgatagttaccggataaggcgcagcggtcgggctgaacggggggttcgtgcacacagcccagcttggagcgaacgacctacaccgaactgagatacctacagcgtgagctatgagaaagcgccacgcttcccgaagggagaaaggcggacaggtatccggtaagcggcagggtcggaacaggagagcgcacgagggagcttccagggggaaacgcctggtatctttatagtcctgtcgggtttcgccacctctgacttgagcgtcgatttttgtgatgctcgtcaggggggcggagcctatggaaaaacgccagcaacgcggcctttttacggttcctggccttttgctggccttttgctcacatggtctttcctgcgttatcccctgattctgtggataaccgtattaccgcctttgagtgagctgataccgctcgccgcagccgaacgaccgagcgcagcgagtcagtgagcgaggaagcggagagcgcccaatacgcaaaccgcctctccccgcgcgttggccgattcattaatgcagctggcacgacaggtttcccgactggaaagcgggcagtgagcgcaacgcaattaatgtgagttagctcactcattaggcaccccaggctttacactttatgcttccggctcgtatgttgtgtggaattgtgagcggataacaatttcacacaggaaacagctatgaccatgattacgccaagcgcgtcaattaaccctcactaaagggaacaaaagctgttaattaagcgcgccacacgcaaacacaaatacacagcggccttgccaccatggtggatctacgcacgctcggctacagccagcagcaacaggagaagatcaaaccgaaggttcgttcgacagtggcgcagcaccacgaggcactggtcggccacgggtttacacacgcgcacatcgttgcgttaagccaacacccggcagcgttagggaccgtcgctgtcaagtatcaggacatgatcgcagcgttgccagaggcgacacacgaagcgatcgttggcgtcggcaaacagtggtccggcgcacgcgctctggaggccttgctcacggtggcgggagagttgagaggtccaccgttacagttggacacaggccaacttctcaagattgcaaaacgtggcggcgtgaccgcagtggaggcagtgcatgcatggcgcaatgcactgacgggtgccccgctcaacttgaccccggagcaggtggtggccatcgccagccacgatggcggcaagcaggcgctggagacggtccagcggctgttgccggtgctgtgccaggcccacggcttgaccccccagcaggtggtggccatcgccagcaatggcggtggcaagcaggcgctggagacggtccagcggctgttgccggtgctgtgccaggcccacggcttgaccccggagcaggtggtggccatcgccagcaatattggtggcaagcaggcgctggagacggtgcaggcgctgttgccggtgctgtgccaggcccacggcttgaccccccagcaggtggtggccatcgccagcaatggcggtggcaagcaggcgctggagacggtccagcggctgttgccggtgctgtgccaggcccacggcttgaccccggagcaggtggtggccatcgccagcaatattggtggcaagcaggcgctggagacggtgcaggcgctgttgccggtgctgtgccaggcccacggcttgaccccggagcaggtggtggccatcgccagcaatattggtggcaagcaggcgctggagacggtgcaggcgctgttgccggtgctgtgccaggcccacggcttgaccccggagcaggtggtggccatcgccagcaatattggtggcaagcaggcgctggagacggtgcaggcgctgttgccggtgctgtgccaggcccacggcttgaccccggagcaggtggtggccatcgccagccacgatggcggcaagcaggcgctggagacggtccagcggctgttgccggtgctgtgccaggcccacggcttgaccccggagcaggtggtggccatcgccagccacgatggcggcaagcaggcgctggagacggtccagcggctgttgccggtgctgtgccaggcccacggcttgaccccccagcaggtggtggccatcgccagcaatggcggtggcaagcaggcgctggagacggtccagcggctgttgccggtgctgtgccaggcccacggcttgaccccggagcaggtggtggccatcgccagcaatattggtggcaagcaggcgctggagacggtgcaggcgctgttgccggtgctgtgccaggcccacggcttgaccccggagcaggtggtggccatcgccagcaatattggtggcaagcaggcgctggagacggtgcaggcgctgttgccggtgctgtgccaggcccacggcttgaccccggagcaggtggtggccatcgccagccacgatggcggcaagcaggcgctggagacggtccagcggctgttgccggtgctgtgccaggcccacggcttgaccccggagcaggtggtggccatcgccagccacgatggcggcaagcaggcgctggagacggtccagcggctgttgccggtgctgtgccaggcccacggcttgaccccggagcaggtggtggccatcgccagccacgatggcggcaagcaggcgctggagacggtccagcggctgttgccggtgctgtgccaggcccacggcttgaccccccagcaggtggtggccatcgccagcaatggcggtggcaagcaggcgctggagacggtccagcggctgttgccggtgctgtgccaggcccacggcttgaccccggagcaggtggtggccatcgccagccacgatggcggcaagcaggcgctggagacggtccagcggctgttgccggtgctgtgccaggcccacggcttgacccctcagcaggtggtggccatcgccagcaatggcggcggcaggccggcgctggagagcattgttgcccagttatctcgccctgatccgggatcctccggaccgaacagaggcgttaccaagcaactagttaaatccgaactggaagagaaaaagtccgagttgcgtcataaactgaagtacgttccacatgaatacattgaactgatcgagattgcccgtaacagcacccaggacagaatcctggaaatgaaagtgatggagtttttcatgaaagtgtacggctacagaggcaaacatttgggcggtagccgtaaaccggatggtgccatctacaccgttggcagcccgatcgattacggcgtgatcgttgataccaaagcctactccggtggctacaacctgccgattggccaggctgacgaaatgcagagatacgtggaagagaaccagactcgtaacaagcatatcaacccgaacgaatggtggaaagtctacccgagttccgtgactgagttcaaatttctgtttgtgagcggccatttcaaaggcaactacaaagcccagctgaccagactgaaccatatcaccaactgcaacggtgccgtcttgagcgtggaagaactgttgattggtggcgaaatgatcaaggctggcaccctgactctggaggaagttagacgtaaattcaacaacggtgaaatcaactttggatcctcggccgactgataagtcgaccaccaccaccaccaccactgataagagctcctcgagcgctagcacccagctttcttgtacaaagtggtgatctagagggcccgcggttcgaaggtaagcctatccctaaccctctcctcggtctcgattctacgcgtaccggttagtaatgagtttaaacgggggaggctaactgaaacacggaaggagacaataccggaaggaacccgcgctatgacggcaataaaaagacagaataaaacgcacgggtgttgggtcgtttgttcataaacgcggggttcggtcccagggctggcactctgtcgataccccaccgagaccccattggggccaatacgcccgcgtttcttccttttccccaccccaccccccaagttcgggtgaaggcccagggctcgcagccaacgtcggggcggcaggccctgccatagcagatctgcgcagctggggctctagggggtatccccacgcgccctgtagcggcgcattaagcgcggcgggtgtggtggttacgcgcagcgtgaccgctacacttgccagcgccctagcgcccgctcctttcgctttcttcccttcctttctcgccacgttcgccggctttccccgtcaagctctaaatcggggcatccctttagggttccgatttagtgctttacggcacctcgaccccaaaaaacttgattagggtgatggttcacgtagtgggccatcgccctgatagacggtttttcgccctttgacgttggagtccacgttctttaatagtggactcttgttccaaactggaacaacactcaaccctatctcggtctattcttttgatttataagggattttggggatttcggcctattggttaaaaaatgagctgatttaacaaaaatttaacgcgaattaattctgtggaatgtgtgtcagttagggtgtggaaagtccccaggctccccagcaggcagaagtatgcaaagcatgcatctcaattagtcagcaaccaggtgtggaaagtccccaggctccccagcaggcagaagtatgcaaagcatgcatctcaattagtcagcaaccatagtcccgcccctaactccgcccatcccgcccctaactccgcccagttccgcccattctccgccccatggctgactaattttttttatttatgcagaggccgaggccgcctctgcctctgagctattccagaagtagtgaggaggcttttttggaggcctaggcttttgcaaaaagctcccgggagcttgtatatccattttcggatctgatcagcacgtgttgacaattaatcatcggcatagtatatcggcatagtataatacgacaaggtgaggaactaaaccatggccaagcctttgtctcaagaagaatccaccctcattgaaagagcaacggctacaatcaacagcatccccatctctgaagactacagcgtcgccagcgcagctctctctagcgacggccgcatcttcactggtgtcaatgtatatcattttactgggggaccttgtgcagaactcgtggtgctgggcactgctgctgctgcggcagctggcaacctgacttgtatcgtcgcgatcggaaatgagaacaggggcatcttgagcccctgcggacggtgccgacaggtgcttctcgatctgcatcctgggatcaaagccatagtgaaggacagtgatggacagccgacggcagttgggattcgtgaattgctgccctctggttatgtgtgggagggctaagcacttcgtggccgaggagcaggactgacacgtgctacgagatttcgattccaccgccgccttctatgaaaggttgggcttcggaatcgttttccgggacgccggctggatgatcctccagcgcggggatctcatgctggagttcttcgcccaccccaacttgtttattgcagcttataatggttacaaataaagcaatagcatcacaaatttcacaaataaagcatttttttcactgcattctagttgtggtttgtccaaactcatcaatgtatcttatcatgtctgtataccgtcgacctctagctagagcttggcgtaatcatggtcatagctgtttcctgtgtgaaattgttatccgctcacaattccacacaacatacgagccggaagcataaagtgtaaagcctggggtgcctaatgagtgagctaactcacattaattgcgttgcgctcactgcccgctttccagtcgggaaacctgtcgtgccagctgcattaatgaatcggccaacgcgcggggagaggcggtttgcgtattgggcgctcttccgcttcctcgctcactgactcgctgcgctcggtcgttcggctgcggcgagcggtatcagctcactcaaaggcggtaatacggttatccacagaatcaggggataacgcaggaaagaac

SEQ ID NO: 359 - DNA, 12449 bp, Artificial sequence
  pCLS14971
atgtgagcaaaaggccagcaaaaggccaggaaccgtaaaaaggccgcgttgctggcgtttttccataggctccgcccccctgacgagcatcacaaaaatcgacgctcaagtcagaggtggcgaaacccgacaggactataaagataccaggcgtttccccctggaagctccctcgtgcgctctcctgttccgaccctgccgcttaccggatacctgtccgcctttctcccttcgggaagcgtggcgctttctcatagctcacgctgtaggtatctcagttcggtgtaggtcgttcgctccaagctgggctgtgtgcacgaaccccccgttcagcccgaccgctgcgccttatccggtaactatcgtcttgagtccaacccggtaagacacgacttatcgccactggcagcagccactggtaacaggattagcagagcgaggtatgtaggcggtgctacagagttcttgaagtggtggcctaactacggctacactagaagaacagtatttggtatctgcgctctgctgaagccagttaccttcggaaaaagagttggtagctcttgatccggcaaacaaaccaccgctggtagcggtttttttgtttgcaagcagcagattacgcgcagaaaaaaaggatctcaagaagatcctttgatcttttctacggggtctgacgctcagtggaacgaaaactcacgttaagggattttggtcatgagattatcaaaaaggatcttcacctagatccttttaaattaaaaatgaagttttaaatcaatctaaagtatatatgagtaaacttggtctgacagttaccaatgcttaatcagtgaggcacctatctcagcgatctgtctatttcgttcatccatagttgcctgactccccgtcgtgtagataactacgatacgggagggcttaccatctggccccagtgctgcaatgataccgcgagacccacgctcaccggctccagatttatcagcaataaaccagccagccggaagggccgagcgcagaagtggtcctgcaactttatccgcctccatccagtctattaattgttgccgggaagctagagtaagtagttcgccagttaatagtttgcgcaacgttgttgccattgctacaggcatcgtggtgtcacgctcgtcgtttggtatggcttcattcagctccggttcccaacgatcaaggcgagttacatgatcccccatgttgtgcaaaaaagcggttagctccttcggtcctccgatcgttgtcagaagtaagttggccgcagtgttatcactcatggttatggcagcactgcataattctcttactgtcatgccatccgtaagatgcttttctgtgactggtgagtactcaaccaagtcattctgagaatagtgtatgcggcgaccgagttgctcttgcccggcgtcaatacgggataataccgcgccacatagcagaactttaaaagtgctcatcattggaaaacgttcttcggggcgaaaactctcaaggatcttaccgctgttgagatccagttcgatgtaacccactcgtgcacccaactgatcttcagcatcttttactttcaccagcgtttctgggtgagcaaaaacaggaaggcaaaatgccgcaaaaaagggaataagggcgacacggaaatgttgaatactcatactcttcctttttcaatattattgaagcatttatcagggttattgtctcatgagcggatacatatttgaatgtatttagaaaaataaacaaataggggttccgcgcacatttccccgaaaagtgccacctgacgtcgacggatcgggagatctcccgatcccctatggtgcactctcagtacaatctgctctgatgccgcatagttaagccagtatctgctccctgcttgtgtgttggaggtcgctgagtagtgcgcgagcaaaatttaagctacaacaaggcaaggcttgaccgacaattgcatgaagaatctgcttagggttaggcgttttgcgctgcttcgcgatgtacgggccagatatacgcgttgacattgattattgactagttattaatagtaatcaattacggggtcattagttcatagcccatatatggagttccgcgttacataacttacggtaaatggcccgcctggctgaccgcccaacgacccccgcccattgacgtcaataatgacgtatgttcccatagtaacgccaatagggactttccattgacgtcaatgggtggagtatttacggtaaactgcccacttggcagtacatcaagtgtatcatatgccaagtacgccccctattgacgtcaatgacggtaaatggcccgcctggcattatgcccagtacatgaccttatgggactttcctacttggcagtacatctacgtattagtcatcgctattaccatggtgatgcggttttggcagtacatcaatgggcgtggatagcggtttgactcacggggatttccaagtctccaccccattgacgtcaatgggagtttgttttggcaccaaaatcaacgggactttccaaaatgtcgtaacaactccgccccattgacgcaaatgggcggtaggcgtgtacggtgggaggtctatataagcagagctctctggctaactagagaacccactgcttactggcttatcgaaatgaattcgactcactgttgggagacccaagctggctagttaagctatcacaagtttgtacaaaaaagcaggctggcgcgcccaattcgccctatagtgagtcgtattacgtcgcgctcactggccgtcgttttacaacgtcgtgactgggaaaaccctggcgttacccaacttaatcgccttgcagcacatccccctttcgccagctggcgtaatagcgaagaggcccgcaccgaaacgcccttcccaacagttgcgcagcctgaatggcgaatgggagcgccctgtagcggcgcattaagcgcggcgggtgtggtggttacgcgcagcgtgaccgctacacttgccagcgccctagcgcccgctcctttcgctttcttcccttcctttctcgccacgttcgccggctttccccgtcaagctctaaatcgggggctccctttagggttccgatttagtgctttacggcacctcgaccccaaaaaacttgattagggtgatggttggcctgtagtgggccatagccctgatagacggtttttcgccctttgacgttggagtccacgttctttaatagtggactcttgttccaaactggaacaacactcaaccctatctcggtctattcttttgatttataagggattttgccgatttcggcctattggttaaaaaatgagctgatttaacaaaaatttaacgcgaattttaacaaaatattaacgcttacaatttaggtggcacttttcggggaaatgtgcgcggaacccctatttgtttatttttctaaatacattcaaatatgtatccgctcatgagacaataaccctgataaatgcttcaataatattgaaaaaggaagagtatgagtattcaacatttccgtgtcgcccttattcccttttttgcggcattttgccttcctgtttttgctcacccagaaacgctggtgaaagtaaaagatgctgaagatcagttgggtgcacgagtgggttacatcgaactggatctcaacagcggtaagatccttgagagttttcgccccgaagaacgttttccaatgatgagcacttttaaagttctgctatgtggcgcggtattatcccgtattgacgccgggcaagagcaactcggtcgccgcatacactattctcagaatgacttggttgagtactcaccagtcacagaaaagcatcttacggatggcatgacagtaagagaattatgcagtgctgccataaccatgagtgataacactgcggccaacttacttctgacaacgatcggaggaccgaaggagctaaccgcttttttgcacaacatgggggatcatgtaactcgccttgatcgttgggaaccggagctgaatgaagccataccaaacgacgagcgtgacaccacgatgcctgtagcaatggcaacaacgttgcgcaaactattaactggcgaactacttactctagcttcccggcaacaattaatagactggatggaggcggataaagttgcaggaccacttctgcgctcggcccttccggctggctggtttattgctgataaatctggagccggtgagcgtggttctcgcggtatcattgcagcactggggccagatggtaagccctcccgtatcgtagttatctacacgacggggagtcaggcaactatggatgaacgaaatagacagatcgctgagataggtgcctcactgattaagcattggtaactgtcagaccaagtttactcatatatactttagattgatttaaaacttcatttttaatttaaaaggatctaggtgaagatcctttttgataatctcatgaccaaaatcccttaacgtgagttttcgttccactgagcgtcagaccccgtagaaaagatcaaaggatcttcttgagatcctttttttctgcgcgtaatctgctgcttgcaaacaaaaaaaccaccgctaccagcggtggtttgtttgccggatcaagagctaccaactctttttccgaaggtaactggcttcagcagagcgcagataccaaatactgttcttctagtgtagccgtagttaggccaccacttcaagaactctgtagcaccgcctacatacctcgctctgctaatcctgttaccagtggctgctgccagtggcgataagtcgtgtcttaccgggttggactcaagacgatagttaccggataaggcgcagcggtcgggctgaacggggggttcgtgcacacagcccagcttggagcgaacgacctacaccgaactgagatacctacagcgtgagctatgagaaagcgccacgcttcccgaagggagaaaggcggacaggtatccggtaagcggcagggtcggaacaggagagcgcacgagggagcttccagggggaaacgcctggtatctttatagtcctgtcgggtttcgccacctctgacttgagcgtcgatttttgtgatgctcgtcaggggggcggagcctatggaaaaacgccagcaacgcggcctttttacggttcctggccttttgctggccttttgctcacatggtctttcctgcgttatcccctgattctgtggataaccgtattaccgcctttgagtgagctgataccgctcgccgcagccgaacgaccgagcgcagcgagtcagtgagcgaggaagcggagagcgcccaatacgcaaaccgcctctccccgcgcgttggccgattcattaatgcagctggcacgacaggtttcccgactggaaagcgggcagtgagcgcaacgcaattaatgtgagttagctcactcattaggcaccccaggctttacactttatgcttccggctcgtatgttgtgtggaattgtgagcggataacaatttcacacaggaaacagctatgaccatgattacgccaagcgcgtcaattaaccctcactaaagggaacaaaagctgttaattaagcgcgccacacgcaaacacaaatacacagcggccttgccaccatgggttccgaggcaccccgggccgagacctttgtcttcctggacctggaagccactgggctccccagtgtggagcccgagattgccgagctgtccctctttgctgtccaccgctcctccctggagaacccggagcacgacgagtctggtgccctagtattgccccgggtcctggacaagctcacgctgtgcatgtgcccggagcgccccttcactgccaaggccagcgagatcaccggcctgagcagtgagggcctggcgcgatgccggaaggctggctttgatggcgccgtggtgcggacgctgcaggccttcctgagccgccaggcagggcccatctgccttgtggcccacaatggctttgattatgatttccccctgctgtgtgccgagctgcggcgcctgggtgcccgcctgccccgggacactgtctgcctggacacgctgccggccctgcggggcctggaccgcgcccacagccacggcacccgggcccggggccgccagggttacagcctcggcagcctcttccaccgctacttccgggcagagccaagcgcagcccactcagccgagggcgacgtgcacaccctgctcctgatcttcctgcaccgcgccgcagagctgctcgcctgggccgatgagcaggcccgtgggtgggcccacatcgagcccatgtacttgccgcctgatgaccccagcctggaggcgactcctccacagaccggtctggatgttccttactccgaggcaccccgggccgagacctttgtcttcctggacctggaagccactgggctccccagtgtggagcccgagattgccgagctgtccctctttgctgtccaccgctcctccctggagaacccggagcacgacgagtctggtgccctagtattgccccgggtcctggacaagctcacgctgtgcatgtgcccggagcgccccttcactgccaaggccagcgagatcaccggcctgagcagtgagggcctggcgcgatgccggaaggctggctttgatggcgccgtggtgcggacgctgcaggccttcctgagccgccaggcagggcccatctgccttgtggcccacaatggctttgattatgatttccccctgctgtgtgccgagctgcggcgcctgggtgcccgcctgccccgggacactgtctgcctggacacgctgccggccctgcggggcctggaccgcgcccacagccacggcacccgggcccggggccgccagggttacagcctcggcagcctcttccaccgctacttccgggcagagccaagcgcagcccactcagccgagggcgacgtgcacaccctgctcctgatcttcctgcaccgcgccgcagagctgctcgcctgggccgatgagcaggcccgtgggtgggcccacatcgagcccatgtacttgccgcctgatgaccccagcctggaggcgggaggtggaggttctggaggtggaggatcctccggagtggatctacgcacgctcggctacagccagcagcaacaggagaagatcaaaccgaaggttcgttcgacagtggcgcagcaccacgaggcactggtcggccacgggtttacacacgcgcacatcgttgcgttaagccaacacccggcagcgttagggaccgtcgctgtcaagtatcaggacatgatcgcagcgttgccagaggcgacacacgaagcgatcgttggcgtcggcaaacagtggtccggcgcacgcgctctggaggccttgctcacggtggcgggagagttgagaggtccaccgttacagttggacacaggccaacttctcaagattgcaaaacgtggcggcgtgaccgcagtggaggcagtgcatgcatggcgcaatgcactgacgggtgccccgctcaacttgaccccggagcaggtggtggccatcgccagccacgatggcggcaagcaggcgctggagacggtccagcggctgttgccggtgctgtgccaggcccacggcttgaccccccagcaggtggtggccatcgccagcaatggcggtggcaagcaggcgctggagacggtccagcggctgttgccggtgctgtgccaggcccacggcttgaccccggagcaggtggtggccatcgccagcaatattggtggcaagcaggcgctggagacggtgcaggcgctgttgccggtgctgtgccaggcccacggcttgaccccccagcaggtggtggccatcgccagcaatggcggtggcaagcaggcgctggagacggtccagcggctgttgccggtgctgtgccaggcccacggcttgaccccggagcaggtggtggccatcgccagcaatattggtggcaagcaggcgctggagacggtgcaggcgctgttgccggtgctgtgccaggcccacggcttgaccccggagcaggtggtggccatcgccagcaatattggtggcaagcaggcgctggagacggtgcaggcgctgttgccggtgctgtgccaggcccacggcttgaccccggagcaggtggtggccatcgccagcaatattggtggcaagcaggcgctggagacggtgcaggcgctgttgccggtgctgtgccaggcccacggcttgaccccggagcaggtggtggccatcgccagccacgatggcggcaagcaggcgctggagacggtccagcggctgttgccggtgctgtgccaggcccacggcttgaccccggagcaggtggtggccatcgccagccacgatggcggcaagcaggcgctggagacggtccagcggctgttgccggtgctgtgccaggcccacggcttgaccccccagcaggtggtggccatcgccagcaatggcggtggcaagcaggcgctggagacggtccagcggctgttgccggtgctgtgccaggcccacggcttgaccccggagcaggtggtggccatcgccagcaatattggtggcaagcaggcgctggagacggtgcaggcgctgttgccggtgctgtgccaggcccacggcttgaccccggagcaggtggtggccatcgccagcaatattggtggcaagcaggcgctggagacggtgcaggcgctgttgccggtgctgtgccaggcccacggcttgaccccggagcaggtggtggccatcgccagccacgatggcggcaagcaggcgctggagacggtccagcggctgttgccggtgctgtgccaggcccacggcttgaccccggagcaggtggtggccatcgccagccacgatggcggcaagcaggcgctggagacggtccagcggctgttgccggtgctgtgccaggcccacggcttgaccccggagcaggtggtggccatcgccagccacgatggcggcaagcaggcgctggagacggtccagcggctgttgccggtgctgtgccaggcccacggcttgaccccccagcaggtggtggccatcgccagcaatggcggtggcaagcaggcgctggagacggtccagcggctgttgccggtgctgtgccaggcccacggcttgaccccggagcaggtggtggccatcgccagccacgatggcggcaagcaggcgctggagacggtccagcggctgttgccggtgctgtgccaggcccacggcttgacccctcagcaggtggtggccatcgccagcaatggcggcggcaggccggcgctggagagcattgttgcccagttatctcgccctgatccgggatcctccggaccgaacagaggcgttaccaagcaactagttaaatccgaactggaagagaaaaagtccgagttgcgtcataaactgaagtacgttccacatgaatacattgaactgatcgagattgcccgtaacagcacccaggacagaatcctggaaatgaaagtgatggagtttttcatgaaagtgtacggctacagaggcaaacatttgggcggtagccgtaaaccggatggtgccatctacaccgttggcagcccgatcgattacggcgtgatcgttgataccaaagcctactccggtggctacaacctgccgattggccaggctgacgaaatgcagagatacgtggaagagaaccagactcgtaacaagcatatcaacccgaacgaatggtggaaagtctacccgagttccgtgactgagttcaaatttctgtttgtgagcggccatttcaaaggcaactacaaagcccagctgaccagactgaaccatatcaccaactgcaacggtgccgtcttgagcgtggaagaactgttgattggtggcgaaatgatcaaggctggcaccctgactctggaggaagttagacgtaaattcaacaacggtgaaatcaactttggatcctcggccgactgataagtcgaccaccaccaccaccaccactgataagagctcctcgagcgctagcacccagctttcttgtacaaagtggtgatctagagggcccgcggttcgaaggtaagcctatccctaaccctctcctcggtctcgattctacgcgtaccggttagtaatgagtttaaacgggggaggctaactgaaacacggaaggagacaataccggaaggaacccgcgctatgacggcaataaaaagacagaataaaacgcacgggtgttgggtcgtttgttcataaacgcggggttcggtcccagggctggcactctgtcgataccccaccgagaccccattggggccaatacgcccgcgtttcttccttttccccaccccaccccccaagttcgggtgaaggcccagggctcgcagccaacgtcggggcggcaggccctgccatagcagatctgcgcagctggggctctagggggtatccccacgcgccctgtagcggcgcattaagcgcggcgggtgtggtggttacgcgcagcgtgaccgctacacttgccagcgccctagcgcccgctcctttcgctttcttcccttcctttctcgccacgttcgccggctttccccgtcaagctctaaatcggggcatccctttagggttccgatttagtgctttacggcacctcgaccccaaaaaacttgattagggtgatggttcacgtagtgggccatcgccctgatagacggtttttcgccctttgacgttggagtccacgttctttaatagtggactcttgttccaaactggaacaacactcaaccctatctcggtctattcttttgatttataagggattttggggatttcggcctattggttaaaaaatgagctgatttaacaaaaatttaacgcgaattaattctgtggaatgtgtgtcagttagggtgtggaaagtccccaggctccccagcaggcagaagtatgcaaagcatgcatctcaattagtcagcaaccaggtgtggaaagtccccaggctccccagcaggcagaagtatgcaaagcatgcatctcaattagtcagcaaccatagtcccgcccctaactccgcccatcccgcccctaactccgcccagttccgcccattctccgccccatggctgactaattttttttatttatgcagaggccgaggccgcctctgcctctgagctattccagaagtagtgaggaggcttttttggaggcctaggcttttgcaaaaagctcccgggagcttgtatatccattttcggatctgatcagcacgtgttgacaattaatcatcggcatagtatatcggcatagtataatacgacaaggtgaggaactaaaccatggccaagcctttgtctcaagaagaatccaccctcattgaaagagcaacggctacaatcaacagcatccccatctctgaagactacagcgtcgccagcgcagctctctctagcgacggccgcatcttcactggtgtcaatgtatatcattttactgggggaccttgtgcagaactcgtggtgctgggcactgctgctgctgcggcagctggcaacctgacttgtatcgtcgcgatcggaaatgagaacaggggcatcttgagcccctgcggacggtgccgacaggtgcttctcgatctgcatcctgggatcaaagccatagtgaaggacagtgatggacagccgacggcagttgggattcgtgaattgctgccctctggttatgtgtgggagggctaagcacttcgtggccgaggagcaggactgacacgtgctacgagatttcgattccaccgccgccttctatgaaaggttgggcttcggaatcgttttccgggacgccggctggatgatcctccagcgcggggatctcatgctggagttcttcgcccaccccaacttgtttattgcagcttataatggttacaaataaagcaatagcatcacaaatttcacaaataaagcatttttttcactgcattctagttgtggtttgtccaaactcatcaatgtatcttatcatgtctgtataccgtcgacctctagctagagcttggcgtaatcatggtcatagctgtttcctgtgtgaaattgttatccgctcacaattccacacaacatacgagccggaagcataaagtgtaaagcctggggtgcctaatgagtgagctaactcacattaattgcgttgcgctcactgcccgctttccagtcgggaaacctgtcgtgccagctgcattaatgaatcggccaacgcgcggggagaggcggtttgcgtattgggcgctcttccgcttcctcgctcactgactcgctgcgctcggtcgttcggctgcggcgagcggtatcagctcactcaaaggcggtaatacggttatccacagaatcaggggataacgcaggaaagaac

SEQ ID NO: 360 - DNA, 7997 bp, Artificial sequence
  pCLS15800
ggtctttcctgcgttatcccctgattctgtggataaccgtattaccgcctttgagtgagctgataccgctcgccgcagccgaacgaccgagcgcagcgagtcagtgagcgaggaagcggagagcgcccaatacgcaaaccgcctctccccgcgcgttggccgattcattaatgcagctggcacgacaggtttcccgactggaaagcgggcagtgagcgcaacgcaattaatgtgagttagctcactcattaggcaccccaggctttacactttatgcttccggctcgtatgttgtgtggaattgtgagcggataacaatttcacacaggaaacagctatgaccatgattacgccaagcgcgtcaattaaccctcactaaagggaacaaaagctgttaattaaggaggaaacattcatggaactgaagaactccatcagcgattacaccgaagccgagttcgtgcagctgttgaaagaaattgagaaagagaacgttgctgccaccgatgacgtgctggatgttttgctggaacattttgtgaagatcactgaacatccagatggcactgacctgatctactacccgagcgataaccgtgatgacagcccagaaggcattgttaaagagatcaaagaatggagagctgccaacggcaagccaggcttcaaacagggttgacggccaactgatttaattaagcgcgccacacgcaaacacaaatacacagcggccttgccaccatggtggatctacgcacgctcggctacagccagcagcaacaggagaagatcaaaccgaaggttcgttcgacagtggcgcagcaccacgaggcactggtcggccacgggtttacacacgcgcacatcgttgcgttaagccaacacccggcagcgttagggaccgtcgctgtcaagtatcaggacatgatcgcagcgttgccagaggcgacacacgaagcgatcgttggcgtcggcaaacagtggtccggcgcacgcgctctggaggccttgctcacggtggcgggagagttgagaggtccaccgttacagttggacacaggccaacttctcaagattgcaaaacgtggcggcgtgaccgcagtggaggcagtgcatgcatggcgcaatgcactgacgggtgccccgctcaacttgaccccggagcaggtggtggccatcgccagccacgatggcggcaagcaggcgctggagacggtccagcggctgttgccggtgctgtgccaggcccacggcttgaccccccagcaggtggtggccatcgccagcaatggcggtggcaagcaggcgctggagacggtccagcggctgttgccggtgctgtgccaggcccacggcttgaccccggagcaggtggtggccatcgccagcaatattggtggcaagcaggcgctggagacggtgcaggcgctgttgccggtgctgtgccaggcccacggcttgaccccccagcaggtggtggccatcgccagcaatggcggtggcaagcaggcgctggagacggtccagcggctgttgccggtgctgtgccaggcccacggcttgaccccggagcaggtggtggccatcgccagcaatattggtggcaagcaggcgctggagacggtgcaggcgctgttgccggtgctgtgccaggcccacggcttgaccccggagcaggtggtggccatcgccagcaatattggtggcaagcaggcgctggagacggtgcaggcgctgttgccggtgctgtgccaggcccacggcttgaccccggagcaggtggtggccatcgccagcaatattggtggcaagcaggcgctggagacggtgcaggcgctgttgccggtgctgtgccaggcccacggcttgaccccggagcaggtggtggccatcgccagccacgatggcggcaagcaggcgctggagacggtccagcggctgttgccggtgctgtgccaggcccacggcttgaccccggagcaggtggtggccatcgccagccacgatggcggcaagcaggcgctggagacggtccagcggctgttgccggtgctgtgccaggcccacggcttgaccccccagcaggtggtggccatcgccagcaatggcggtggcaagcaggcgctggagacggtccagcggctgttgccggtgctgtgccaggcccacggcttgaccccggagcaggtggtggccatcgccagcaatattggtggcaagcaggcgctggagacggtgcaggcgctgttgccggtgctgtgccaggcccacggcttgaccccggagcaggtggtggccatcgccagcaatattggtggcaagcaggcgctggagacggtgcaggcgctgttgccggtgctgtgccaggcccacggcttgaccccggagcaggtggtggccatcgccagccacgatggcggcaagcaggcgctggagacggtccagcggctgttgccggtgctgtgccaggcccacggcttgaccccggagcaggtggtggccatcgccagccacgatggcggcaagcaggcgctggagacggtccagcggctgttgccggtgctgtgccaggcccacggcttgaccccggagcaggtggtggccatcgccagccacgatggcggcaagcaggcgctggagacggtccagcggctgttgccggtgctgtgccaggcccacggcttgaccccccagcaggtggtggccatcgccagcaatggcggtggcaagcaggcgctggagacggtccagcggctgttgccggtgctgtgccaggcccacggcttgaccccggagcaggtggtggccatcgccagccacgatggcggcaagcaggcgctggagacggtccagcggctgttgccggtgctgtgccaggcccacggcttgacccctcagcaggtggtggccatcgccagcaatggcggcggcaggccggcgctggagagcattgttgcccagttatctcgccctgatccgggatcctccggatctaaacgcaacaaaccaggtaaggccactggcaaaggtaaaccagtgaacaataagtggctgaacaacgctggcaaagacttgggttctccagtgccggatcgcattgccaacaagctgagagacaaagaattcaagagttttgatgactttcgcgcaaaattctgggaagaagtgtctaaagatccagaactgtctaaacagtttagtcgcaacaacaatgacagaatgaaagttggtaaagctccgaagacccgcacccaagacgtgtctggcaaacgcaccagttttgaattgcatcatgaaaaaccaatctctcagaatggtggcgtttacgacatggacaacatctctgtggttactccgaaaagacatatcgatattcatcgcggtaaaggatccaccggtggatcctccggagtggatctacgcacgctcggctacagccagcagcaacaggagaagatcaaaccgaaggttcgttcgacagtggcgcagcaccacgaggcactggtcggccacgggtttacacacgcgcacatcgttgcgttaagccaacacccggcagcgttagggaccgtcgctgtcaagtatcaggacatgatcgcagcgttgccagaggcgacacacgaagcgatcgttggcgtcggcaaacagtggtccggcgcacgcgctctggaggccttgctcacggtggcgggagagttgagaggtccaccgttacagttggacacaggccaacttctcaagattgcaaaacgtggcggcgtgaccgcagtggaggcagtgcatgcatggcgcaatgcactgacgggtgccccgctcaacttgaccccccagcaggtggtggccatcgccagcaataatggtggcaagcaggcgctggagacggtccagcggctgttgccggtgctgtgccaggcccacggcttgaccccccagcaggtggtggccatcgccagcaatggcggtggcaagcaggcgctggagacggtccagcggctgttgccggtgctgtgccaggcccacggcttgaccccccagcaggtggtggccatcgccagcaatggcggtggcaagcaggcgctggagacggtccagcggctgttgccggtgctgtgccaggcccacggcttgaccccccagcaggtggtggccatcgccagcaatggcggtggcaagcaggcgctggagacggtccagcggctgttgccggtgctgtgccaggcccacggcttgaccccggagcaggtggtggccatcgccagcaatattggtggcaagcaggcgctggagacggtgcaggcgctgttgccggtgctgtgccaggcccacggcttgaccccccagcaggtggtggccatcgccagcaatggcggtggcaagcaggcgctggagacggtccagcggctgttgccggtgctgtgccaggcccacggcttgaccccccagcaggtggtggccatcgccagcaataatggtggcaagcaggcgctggagacggtccagcggctgttgccggtgctgtgccaggcccacggcttgaccccccagcaggtggtggccatcgccagcaataatggtggcaagcaggcgctggagacggtccagcggctgttgccggtgctgtgccaggcccacggcttgaccccccagcaggtggtggccatcgccagcaatggcggtggcaagcaggcgctggagacggtccagcggctgttgccggtgctgtgccaggcccacggcttgaccccccagcaggtggtggccatcgccagcaatggcggtggcaagcaggcgctggagacggtccagcggctgttgccggtgctgtgccaggcccacggcttgaccccggagcaggtggtggccatcgccagcaatattggtggcaagcaggcgctggagacggtgcaggcgctgttgccggtgctgtgccaggcccacggcttgaccccggagcaggtggtggccatcgccagccacgatggcggcaagcaggcgctggagacggtccagcggctgttgccggtgctgtgccaggcccacggcttgaccccccagcaggtggtggccatcgccagcaatggcggtggcaagcaggcgctggagacggtccagcggctgttgccggtgctgtgccaggcccacggcttgaccccccagcaggtggtggccatcgccagcaatggcggtggcaagcaggcgctggagacggtccagcggctgttgccggtgctgtgccaggcccacggcttgaccccggagcaggtggtggccatcgccagcaatattggtggcaagcaggcgctggagacggtgcaggcgctgttgccggtgctgtgccaggcccacggcttgacccctcagcaggtggtggccatcgccagcaatggcggcggcaggccggcgctggagagcattgttgcccagttatctcgccctgatccgtcggccgactgataagtcgaccaccaccaccaccaccactgataagagctcctcgagcctgcagcagctgaagctttggacttctggcgcgcccaattcgccctatagtgagtcgtattacgtcgcgctcactggccgtcgttttacaacgtcgtgactgggaaaaccctggcgttacccaacttaatcgccttgcagcacatccccctttcgccagctggcgtaatagcgaagaggcccgcaccgaaacgcccttcccaacagttgcgcagcctgaatggcgaatgggagcgccctgtagcggcgcattaagcgcggcgggtgtggtggttacgcgcagcgtgaccgctacacttgccagcgccctagcgcccgctcctttcgctttcttcccttcctttctcgccacgttcgccggctttccccgtcaagctctaaatcgggggctccctttagggttccgatttagtgctttacggcacctcgaccccaaaaaacttgattagggtgatggttggcctgtagtgggccatagccctgatagacggtttttcgccctttgacgttggagtccacgttctttaatagtggactcttgttccaaactggaacaacactcaaccctatctcggtctattcttttgatttataagggattttgccgatttcggcctattggttaaaaaatgagctgatttaacaaaaatttaacgcgaattttaacaaaatattaacgcttacaatttaggtggcacttttcggggaaatgtgcgcggaacccctatttgtttatttttctaaatacattcaaatatgtatccgctcatgagacaataaccctgataaatgcttcaataatattgaaaaaggaagagtatgagtattcaacatttccgtgtcgcccttattcccttttttgcggcattttgccttcctgtttttgctcacccagaaacgctggtgaaagtaaaagatgctgaagatcagttgggtgcacgagtgggttacatcgaactggatctcaacagcggtaagatccttgagagttttcgccccgaagaacgttttccaatgatgagcacttttaaagttctgctatgtggcgcggtattatcccgtattgacgccgggcaagagcaactcggtcgccgcatacactattctcagaatgacttggttgagtactcaccagtcacagaaaagcatcttacggatggcatgacagtaagagaattatgcagtgctgccataaccatgagtgataacactgcggccaacttacttctgacaacgatcggaggaccgaaggagctaaccgcttttttgcacaacatgggggatcatgtaactcgccttgatcgttgggaaccggagctgaatgaagccataccaaacgacgagcgtgacaccacgatgcctgtagcaatggcaacaacgttgcgcaaactattaactggcgaactacttactctagcttcccggcaacaattaatagactggatggaggcggataaagttgcaggaccacttctgcgctcggcccttccggctggctggtttattgctgataaatctggagccggtgagcgtggttctcgcggtatcattgcagcactggggccagatggtaagccctcccgtatcgtagttatctacacgacggggagtcaggcaactatggatgaacgaaatagacagatcgctgagataggtgcctcactgattaagcattggtaactgtcagaccaagtttactcatatatactttagattgatttaaaacttcatttttaatttaaaaggatctaggtgaagatcctttttgataatctcatgaccaaaatcccttaacgtgagttttcgttccactgagcgtcagaccccgtagaaaagatcaaaggatcttcttgagatcctttttttctgcgcgtaatctgctgcttgcaaacaaaaaaaccaccgctaccagcggtggtttgtttgccggatcaagagctaccaactctttttccgaaggtaactggcttcagcagagcgcagataccaaatactgttcttctagtgtagccgtagttaggccaccacttcaagaactctgtagcaccgcctacatacctcgctctgctaatcctgttaccagtggctgctgccagtggcgataagtcgtgtcttaccgggttggactcaagacgatagttaccggataaggcgcagcggtcgggctgaacggggggttcgtgcacacagcccagcttggagcgaacgacctacaccgaactgagatacctacagcgtgagctatgagaaagcgccacgcttcccgaagggagaaaggcggacaggtatccggtaagcggcagggtcggaacaggagagcgcacgagggagcttccagggggaaacgcctggtatctttatagtcctgtcgggtttcgccacctctgacttgagcgtcgatttttgtgatgctcgtcaggggggcggagcctatggaaaaacgccagcaacgcggcctttttacggttcctggccttttgctggccttttgctcacat

SEQ ID NO: 361 - DNA, 7997 bp, Artificial sequence
  pCLS15801
ggtctttcctgcgttatcccctgattctgtggataaccgtattaccgcctttgagtgagctgataccgctcgccgcagccgaacgaccgagcgcagcgagtcagtgagcgaggaagcggagagcgcccaatacgcaaaccgcctctccccgcgcgttggccgattcattaatgcagctggcacgacaggtttcccgactggaaagcgggcagtgagcgcaacgcaattaatgtgagttagctcactcattaggcaccccaggctttacactttatgcttccggctcgtatgttgtgtggaattgtgagcggataacaatttcacacaggaaacagctatgaccatgattacgccaagcgcgtcaattaaccctcactaaagggaacaaaagctgttaattaaggaggaaacattcatggaactgaagaactccatcagcgattacaccgaagccgagttcgtgcagctgttgaaagaaattgagaaagagaacgttgctgccaccgatgacgtgctggatgttttgctggaacattttgtgaagatcactgaacatccagatggcactgacctgatctactacccgagcgataaccgtgatgacagcccagaaggcattgttaaagagatcaaagaatggagagctgccaacggcaagccaggcttcaaacagggttgacggccaactgatttaattaagcgcgccacacgcaaacacaaatacacagcggccttgccaccatggtggatctacgcacgctcggctacagccagcagcaacaggagaagatcaaaccgaaggttcgttcgacagtggcgcagcaccacgaggcactggtcggccacgggtttacacacgcgcacatcgttgcgttaagccaacacccggcagcgttagggaccgtcgctgtcaagtatcaggacatgatcgcagcgttgccagaggcgacacacgaagcgatcgttggcgtcggcaaacagtggtccggcgcacgcgctctggaggccttgctcacggtggcgggagagttgagaggtccaccgttacagttggacacaggccaacttctcaagattgcaaaacgtggcggcgtgaccgcagtggaggcagtgcatgcatggcgcaatgcactgacgggtgccccgctcaacttgaccccccagcaggtggtggccatcgccagcaataatggtggcaagcaggcgctggagacggtccagcggctgttgccggtgctgtgccaggcccacggcttgaccccccagcaggtggtggccatcgccagcaatggcggtggcaagcaggcgctggagacggtccagcggctgttgccggtgctgtgccaggcccacggcttgaccccccagcaggtggtggccatcgccagcaatggcggtggcaagcaggcgctggagacggtccagcggctgttgccggtgctgtgccaggcccacggcttgaccccccagcaggtggtggccatcgccagcaatggcggtggcaagcaggcgctggagacggtccagcggctgttgccggtgctgtgccaggcccacggcttgaccccggagcaggtggtggccatcgccagcaatattggtggcaagcaggcgctggagacggtgcaggcgctgttgccggtgctgtgccaggcccacggcttgaccccccagcaggtggtggccatcgccagcaatggcggtggcaagcaggcgctggagacggtccagcggctgttgccggtgctgtgccaggcccacggcttgaccccccagcaggtggtggccatcgccagcaataatggtggcaagcaggcgctggagacggtccagcggctgttgccggtgctgtgccaggcccacggcttgaccccccagcaggtggtggccatcgccagcaataatggtggcaagcaggcgctggagacggtccagcggctgttgccggtgctgtgccaggcccacggcttgaccccccagcaggtggtggccatcgccagcaatggcggtggcaagcaggcgctggagacggtccagcggctgttgccggtgctgtgccaggcccacggcttgaccccccagcaggtggtggccatcgccagcaatggcggtggcaagcaggcgctggagacggtccagcggctgttgccggtgctgtgccaggcccacggcttgaccccggagcaggtggtggccatcgccagcaatattggtggcaagcaggcgctggagacggtgcaggcgctgttgccggtgctgtgccaggcccacggcttgaccccggagcaggtggtggccatcgccagccacgatggcggcaagcaggcgctggagacggtccagcggctgttgccggtgctgtgccaggcccacggcttgaccccccagcaggtggtggccatcgccagcaatggcggtggcaagcaggcgctggagacggtccagcggctgttgccggtgctgtgccaggcccacggcttgaccccccagcaggtggtggccatcgccagcaatggcggtggcaagcaggcgctggagacggtccagcggctgttgccggtgctgtgccaggcccacggcttgaccccggagcaggtggtggccatcgccagcaatattggtggcaagcaggcgctggagacggtgcaggcgctgttgccggtgctgtgccaggcccacggcttgacccctcagcaggtggtggccatcgccagcaatggcggcggcaggccggcgctggagagcattgttgcccagttatctcgccctgatccgggatcctccggatctaaacgcaacaaaccaggtaaggccactggcaaaggtaaaccagtgaacaataagtggctgaacaacgctggcaaagacttgggttctccagtgccggatcgcattgccaacaagctgagagacaaagaattcaagagttttgatgactttcgcgcaaaattctgggaagaagtgtctaaagatccagaactgtctaaacagtttagtcgcaacaacaatgacagaatgaaagttggtaaagctccgaagacccgcacccaagacgtgtctggcaaacgcaccagttttgaattgcatcatgaaaaaccaatctctcagaatggtggcgtttacgacatggacaacatctctgtggttactccgaaaagacatatcgatattcatcgcggtaaaggatccaccggtggatcctccggagtggatctacgcacgctcggctacagccagcagcaacaggagaagatcaaaccgaaggttcgttcgacagtggcgcagcaccacgaggcactggtcggccacgggtttacacacgcgcacatcgttgcgttaagccaacacccggcagcgttagggaccgtcgctgtcaagtatcaggacatgatcgcagcgttgccagaggcgacacacgaagcgatcgttggcgtcggcaaacagtggtccggcgcacgcgctctggaggccttgctcacggtggcgggagagttgagaggtccaccgttacagttggacacaggccaacttctcaagattgcaaaacgtggcggcgtgaccgcagtggaggcagtgcatgcatggcgcaatgcactgacgggtgccccgctcaacttgaccccggagcaggtggtggccatcgccagccacgatggcggcaagcaggcgctggagacggtccagcggctgttgccggtgctgtgccaggcccacggcttgaccccccagcaggtggtggccatcgccagcaatggcggtggcaagcaggcgctggagacggtccagcggctgttgccggtgctgtgccaggcccacggcttgaccccggagcaggtggtggccatcgccagcaatattggtggcaagcaggcgctggagacggtgcaggcgctgttgccggtgctgtgccaggcccacggcttgaccccccagcaggtggtggccatcgccagcaatggcggtggcaagcaggcgctggagacggtccagcggctgttgccggtgctgtgccaggcccacggcttgaccccggagcaggtggtggccatcgccagcaatattggtggcaagcaggcgctggagacggtgcaggcgctgttgccggtgctgtgccaggcccacggcttgaccccggagcaggtggtggccatcgccagcaatattggtggcaagcaggcgctggagacggtgcaggcgctgttgccggtgctgtgccaggcccacggcttgaccccggagcaggtggtggccatcgccagcaatattggtggcaagcaggcgctggagacggtgcaggcgctgttgccggtgctgtgccaggcccacggcttgaccccggagcaggtggtggccatcgccagccacgatggcggcaagcaggcgctggagacggtccagcggctgttgccggtgctgtgccaggcccacggcttgaccccggagcaggtggtggccatcgccagccacgatggcggcaagcaggcgctggagacggtccagcggctgttgccggtgctgtgccaggcccacggcttgaccccccagcaggtggtggccatcgccagcaatggcggtggcaagcaggcgctggagacggtccagcggctgttgccggtgctgtgccaggcccacggcttgaccccggagcaggtggtggccatcgccagcaatattggtggcaagcaggcgctggagacggtgcaggcgctgttgccggtgctgtgccaggcccacggcttgaccccggagcaggtggtggccatcgccagcaatattggtggcaagcaggcgctggagacggtgcaggcgctgttgccggtgctgtgccaggcccacggcttgaccccggagcaggtggtggccatcgccagccacgatggcggcaagcaggcgctggagacggtccagcggctgttgccggtgctgtgccaggcccacggcttgaccccggagcaggtggtggccatcgccagccacgatggcggcaagcaggcgctggagacggtccagcggctgttgccggtgctgtgccaggcccacggcttgaccccggagcaggtggtggccatcgccagccacgatggcggcaagcaggcgctggagacggtccagcggctgttgccggtgctgtgccaggcccacggcttgaccccccagcaggtggtggccatcgccagcaatggcggtggcaagcaggcgctggagacggtccagcggctgttgccggtgctgtgccaggcccacggcttgaccccggagcaggtggtggccatcgccagccacgatggcggcaagcaggcgctggagacggtccagcggctgttgccggtgctgtgccaggcccacggcttgacccctcagcaggtggtggccatcgccagcaatggcggcggcaggccggcgctggagagcattgttgcccagttatctcgccctgatccgtcggccgactgataagtcgaccaccaccaccaccaccactgataagagctcctcgagcctgcagcagctgaagctttggacttctggcgcgcccaattcgccctatagtgagtcgtattacgtcgcgctcactggccgtcgttttacaacgtcgtgactgggaaaaccctggcgttacccaacttaatcgccttgcagcacatccccctttcgccagctggcgtaatagcgaagaggcccgcaccgaaacgcccttcccaacagttgcgcagcctgaatggcgaatgggagcgccctgtagcggcgcattaagcgcggcgggtgtggtggttacgcgcagcgtgaccgctacacttgccagcgccctagcgcccgctcctttcgctttcttcccttcctttctcgccacgttcgccggctttccccgtcaagctctaaatcgggggctccctttagggttccgatttagtgctttacggcacctcgaccccaaaaaacttgattagggtgatggttggcctgtagtgggccatagccctgatagacggtttttcgccctttgacgttggagtccacgttctttaatagtggactcttgttccaaactggaacaacactcaaccctatctcggtctattcttttgatttataagggattttgccgatttcggcctattggttaaaaaatgagctgatttaacaaaaatttaacgcgaattttaacaaaatattaacgcttacaatttaggtggcacttttcggggaaatgtgcgcggaacccctatttgtttatttttctaaatacattcaaatatgtatccgctcatgagacaataaccctgataaatgcttcaataatattgaaaaaggaagagtatgagtattcaacatttccgtgtcgcccttattcccttttttgcggcattttgccttcctgtttttgctcacccagaaacgctggtgaaagtaaaagatgctgaagatcagttgggtgcacgagtgggttacatcgaactggatctcaacagcggtaagatccttgagagttttcgccccgaagaacgttttccaatgatgagcacttttaaagttctgctatgtggcgcggtattatcccgtattgacgccgggcaagagcaactcggtcgccgcatacactattctcagaatgacttggttgagtactcaccagtcacagaaaagcatcttacggatggcatgacagtaagagaattatgcagtgctgccataaccatgagtgataacactgcggccaacttacttctgacaacgatcggaggaccgaaggagctaaccgcttttttgcacaacatgggggatcatgtaactcgccttgatcgttgggaaccggagctgaatgaagccataccaaacgacgagcgtgacaccacgatgcctgtagcaatggcaacaacgttgcgcaaactattaactggcgaactacttactctagcttcccggcaacaattaatagactggatggaggcggataaagttgcaggaccacttctgcgctcggcccttccggctggctggtttattgctgataaatctggagccggtgagcgtggttctcgcggtatcattgcagcactggggccagatggtaagccctcccgtatcgtagttatctacacgacggggagtcaggcaactatggatgaacgaaatagacagatcgctgagataggtgcctcactgattaagcattggtaactgtcagaccaagtttactcatatatactttagattgatttaaaacttcatttttaatttaaaaggatctaggtgaagatcctttttgataatctcatgaccaaaatcccttaacgtgagttttcgttccactgagcgtcagaccccgtagaaaagatcaaaggatcttcttgagatcctttttttctgcgcgtaatctgctgcttgcaaacaaaaaaaccaccgctaccagcggtggtttgtttgccggatcaagagctaccaactctttttccgaaggtaactggcttcagcagagcgcagataccaaatactgttcttctagtgtagccgtagttaggccaccacttcaagaactctgtagcaccgcctacatacctcgctctgctaatcctgttaccagtggctgctgccagtggcgataagtcgtgtcttaccgggttggactcaagacgatagttaccggataaggcgcagcggtcgggctgaacggggggttcgtgcacacagcccagcttggagcgaacgacctacaccgaactgagatacctacagcgtgagctatgagaaagcgccacgcttcccgaagggagaaaggcggacaggtatccggtaagcggcagggtcggaacaggagagcgcacgagggagcttccagggggaaacgcctggtatctttatagtcctgtcgggtttcgccacctctgacttgagcgtcgatttttgtgatgctcgtcaggggggcggagcctatggaaaaacgccagcaacgcggcctttttacggttcctggccttttgctggccttttgctcacat

SEQ ID NO: 362 - DNA, 13011 bp, Artificial sequence
  pCLS12106
atgtgagcaaaaggccagcaaaaggccaggaaccgtaaaaaggccgcgttgctggcgtttttccataggctccgcccccctgacgagcatcacaaaaatcgacgctcaagtcagaggtggcgaaacccgacaggactataaagataccaggcgtttccccctggaagctccctcgtgcgctctcctgttccgaccctgccgcttaccggatacctgtccgcctttctcccttcgggaagcgtggcgctttctcatagctcacgctgtaggtatctcagttcggtgtaggtcgttcgctccaagctgggctgtgtgcacgaaccccccgttcagcccgaccgctgcgccttatccggtaactatcgtcttgagtccaacccggtaagacacgacttatcgccactggcagcagccactggtaacaggattagcagagcgaggtatgtaggcggtgctacagagttcttgaagtggtggcctaactacggctacactagaaggacagtatttggtatctgcgctctgctgaagccagttaccttcggaaaaagagttggtagctcttgatccggcaaacaaaccaccgctggtagcggtggtttttttgtttgcaagcagcagattacgcgcagaaaaaaaggatctcaagaagatcctttgatcttttctacggggtctgacgctcagtggaacgaaaactcacgttaagggattttggtcatgagattatcaaaaaggatcttcacctagatccttttaaattaaaaatgaagttttaaatcaatctaaagtatatatgagtaaacttggtctgacagttaccaatgcttaatcagtgaggcacctatctcagcgatctgtctatttcgttcatccatagttgcctgactccccgtcgtgtagataactacgatacgggagggcttaccatctggccccagtgctgcaatgataccgcgagacccacgctcaccggctccagatttatcagcaataaaccagccagccggaagggccgagcgcagaagtggtcctgcaactttatccgcctccatccagtctattaattgttgccgggaagctagagtaagtagttcgccagttaatagtttgcgcaacgttgttgccattgctacaggcatcgtggtgtcacgctcgtcgtttggtatggcttcattcagctccggttcccaacgatcaaggcgagttacatgatcccccatgttgtgcaaaaaagcggttagctccttcggtcctccgatcgttgtcagaagtaagttggccgcagtgttatcactcatggttatggcagcactgcataattctcttactgtcatgccatccgtaagatgcttttctgtgactggtgagtactcaaccaagtcattctgagaatagtgtatgcggcgaccgagttgctcttgcccggcgtcaatacgggataataccgcgccacatagcagaactttaaaagtgctcatcattggaaaacgttcttcggggcgaaaactctcaaggatcttaccgctgttgagatccagttcgatgtaacccactcgtgcacccaactgatcttcagcatcttttactttcaccagcgtttctgggtgagcaaaaacaggaaggcaaaatgccgcaaaaaagggaataagggcgacacggaaatgttgaatactcatactcttcctttttcaatattattgaagcatttatcagggttattgtctcatgagcggatacatatttgaatgtatttagaaaaataaacaaataggggttccgcgcacatttccccgaaaagtgccacctgacgtccgatcaaaaatcatcgcttcgctgattaattaccccagaaataaggctaaaaaactaatcgcattatcatcctatggttgttaatttgattcgttcatttgaaggtttgtggggccaggttactgccaatttttcctcttcataaccataaaagctagtattgtagaatctttattgttcggagcagtgcggcgcgaggcacatctgcgtttcaggaacgcgaccggtgaagacgaggacgcacggaggagagtcttccttcggagggctgtcacccgctcggcggcttctaatccgtacttcaatatagcaatgagcagttaagcgtattactgaaagttccaaagagaaggtttttttaggctaatcgacctcgagcagatccgccaggcgtgtatatagcgtggatggccaggcaactttagtgctgacacatacaggcatatatatatgtgtgcgacgacacatgatcatatggcatgcatgtgctctgtatgtatataaaactcttgttttcttcttttctctaaatattctttccttatacattaggtcctttgtagcataaattactatacttctatagacacgcaaacacaaatacacagcggccttgccaccatggtggatctacgcacgctcggctacagccagcagcaacaggagaagatcaaaccgaaggttcgttcgacagtggcgcagcaccacgaggcactggtcggccacgggtttacacacgcgcacatcgttgcgttaagccaacacccggcagcgttagggaccgtcgctgtcaagtatcaggacatgatcgcagcgttgccagaggcgacacacgaagcgatcgttggcgtcggcaaacagtggtccggcgcacgcgctctggaggccttgctcacggtggcgggagagttgagaggtccaccgttacagttggacacaggccaacttctcaagattgcaaaacgtggcggcgtgaccgcagtggaggcagtgcatgcatggcgcaatgcactgacgggtgccccgctcaacttgaccccggagcaggtggtggccatcgccagccacgatggcggcaagcaggcgctggagacggtccagcggctgttgccggtgctgtgccaggcccacggcttgaccccccagcaggtggtggccatcgccagcaatggcggtggcaagcaggcgctggagacggtccagcggctgttgccggtgctgtgccaggcccacggcttgaccccggagcaggtggtggccatcgccagcaatattggtggcaagcaggcgctggagacggtgcaggcgctgttgccggtgctgtgccaggcccacggcttgaccccccagcaggtggtggccatcgccagcaatggcggtggcaagcaggcgctggagacggtccagcggctgttgccggtgctgtgccaggcccacggcttgaccccggagcaggtggtggccatcgccagcaatattggtggcaagcaggcgctggagacggtgcaggcgctgttgccggtgctgtgccaggcccacggcttgaccccggagcaggtggtggccatcgccagcaatattggtggcaagcaggcgctggagacggtgcaggcgctgttgccggtgctgtgccaggcccacggcttgaccccggagcaggtggtggccatcgccagcaatattggtggcaagcaggcgctggagacggtgcaggcgctgttgccggtgctgtgccaggcccacggcttgaccccggagcaggtggtggccatcgccagccacgatggcggcaagcaggcgctggagacggtccagcggctgttgccggtgctgtgccaggcccacggcttgaccccggagcaggtggtggccatcgccagccacgatggcggcaagcaggcgctggagacggtccagcggctgttgccggtgctgtgccaggcccacggcttgaccccccagcaggtggtggccatcgccagcaatggcggtggcaagcaggcgctggagacggtccagcggctgttgccggtgctgtgccaggcccacggcttgaccccggagcaggtggtggccatcgccagcaatattggtggcaagcaggcgctggagacggtgcaggcgctgttgccggtgctgtgccaggcccacggcttgaccccggagcaggtggtggccatcgccagcaatattggtggcaagcaggcgctggagacggtgcaggcgctgttgccggtgctgtgccaggcccacggcttgaccccggagcaggtggtggccatcgccagccacgatggcggcaagcaggcgctggagacggtccagcggctgttgccggtgctgtgccaggcccacggcttgaccccggagcaggtggtggccatcgccagccacgatggcggcaagcaggcgctggagacggtccagcggctgttgccggtgctgtgccaggcccacggcttgaccccggagcaggtggtggccatcgccagccacgatggcggcaagcaggcgctggagacggtccagcggctgttgccggtgctgtgccaggcccacggcttgaccccccagcaggtggtggccatcgccagcaatggcggtggcaagcaggcgctggagacggtccagcggctgttgccggtgctgtgccaggcccacggcttgaccccggagcaggtggtggccatcgccagccacgatggcggcaagcaggcgctggagacggtccagcggctgttgccggtgctgtgccaggcccacggcttgacccctcagcaggtggtggccatcgccagcaatggcggcggcaggccggcgctggagagcattgttgcccagttatctcgccctgatccgggatcctccggatctaaacgcaacaaaccaggtaaggccactggcaaaggtaaaccagtgaacaataagtggctgaacaacgctggcaaagacttgggttctccagtgccggatcgcattgccaacaagctgagagacaaagaattcaagagttttgatgactttcgcgcaaaattctgggaagaagtgtctaaagatccagaactgtctaaacagtttagtcgcaacaacaatgacagaatgaaagttggtaaagctccgaagacccgcacccaagacgtgtctggcaaacgcaccagttttgaattgcatcatgaaaaaccaatctctcagaatggtggcgtttacgacatggacaacatctctgtggttactccgaaaagacatatcgatattcatcgcggtaaaggatccaccggtggatcctccggagtggatctacgcacgctcggctacagccagcagcaacaggagaagatcaaaccgaaggttcgttcgacagtggcgcagcaccacgaggcactggtcggccacgggtttacacacgcgcacatcgttgcgttaagccaacacccggcagcgttagggaccgtcgctgtcaagtatcaggacatgatcgcagcgttgccagaggcgacacacgaagcgatcgttggcgtcggcaaacagtggtccggcgcacgcgctctggaggccttgctcacggtggcgggagagttgagaggtccaccgttacagttggacacaggccaacttctcaagattgcaaaacgtggcggcgtgaccgcagtggaggcagtgcatgcatggcgcaatgcactgacgggtgccccgctcaacttgaccccccagcaggtggtggccatcgccagcaataatggtggcaagcaggcgctggagacggtccagcggctgttgccggtgctgtgccaggcccacggcttgaccccccagcaggtggtggccatcgccagcaatggcggtggcaagcaggcgctggagacggtccagcggctgttgccggtgctgtgccaggcccacggcttgaccccccagcaggtggtggccatcgccagcaatggcggtggcaagcaggcgctggagacggtccagcggctgttgccggtgctgtgccaggcccacggcttgaccccccagcaggtggtggccatcgccagcaatggcggtggcaagcaggcgctggagacggtccagcggctgttgccggtgctgtgccaggcccacggcttgaccccggagcaggtggtggccatcgccagcaatattggtggcaagcaggcgctggagacggtgcaggcgctgttgccggtgctgtgccaggcccacggcttgaccccccagcaggtggtggccatcgccagcaatggcggtggcaagcaggcgctggagacggtccagcggctgttgccggtgctgtgccaggcccacggcttgaccccccagcaggtggtggccatcgccagcaataatggtggcaagcaggcgctggagacggtccagcggctgttgccggtgctgtgccaggcccacggcttgaccccccagcaggtggtggccatcgccagcaataatggtggcaagcaggcgctggagacggtccagcggctgttgccggtgctgtgccaggcccacggcttgaccccccagcaggtggtggccatcgccagcaatggcggtggcaagcaggcgctggagacggtccagcggctgttgccggtgctgtgccaggcccacggcttgaccccccagcaggtggtggccatcgccagcaatggcggtggcaagcaggcgctggagacggtccagcggctgttgccggtgctgtgccaggcccacggcttgaccccggagcaggtggtggccatcgccagcaatattggtggcaagcaggcgctggagacggtgcaggcgctgttgccggtgctgtgccaggcccacggcttgaccccggagcaggtggtggccatcgccagccacgatggcggcaagcaggcgctggagacggtccagcggctgttgccggtgctgtgccaggcccacggcttgaccccccagcaggtggtggccatcgccagcaatggcggtggcaagcaggcgctggagacggtccagcggctgttgccggtgctgtgccaggcccacggcttgaccccccagcaggtggtggccatcgccagcaatggcggtggcaagcaggcgctggagacggtccagcggctgttgccggtgctgtgccaggcccacggcttgaccccggagcaggtggtggccatcgccagcaatattggtggcaagcaggcgctggagacggtgcaggcgctgttgccggtgctgtgccaggcccacggcttgacccctcagcaggtggtggccatcgccagcaatggcggcggcaggccggcgctggagagcattgttgcccagttatctcgccctgatccgtcggccgactgataactcgagcgatcctctagacgagctcctcgagcctgcagcagctgaagctttggacttcttcgccagaggtttggtcaagtctccaatcaaggttgtcggcttgtctaccttgccagaaatttacgaaaagatggaaaagggtcaaatcgttggtagatacgttgttgacacttctaaataagcgaatttcttatgatttatgatttttattattaaataagttataaaaaaaataagtgtatacaaattttaaagtgactcttaggttttaaaacgaaaattcttattcttgagtaactctttcctgtaggtcaggttgctttctcaggtatagcatgaggtcgctcttattgaccacacctctaccggcatgcaagcttggcgtaatcatggtcatagctgtttcctgtgtgaaattgttatccgctcacaattccacacaacatacgagccggaagcataaagtgtaaagcctggggtgcctaatgagtgagctaactcacattaattgcgttgcgctcactgcccgctttccagtcgggaaacctgtcgtgccagcagatctattacattatgggtggtatgttggaataaaaatcaactatcatctactaactagtatttacgttactagtatattatcatatacggtgttagaagatgacgcaaatgatgagaaatagtcatctaaattagtggaagctgaaacgcaaggattgataatgtaataggatcaatgaatattaacatataaaatgatgataataatatttatagaattgtgtagaattgcagattcccttttatggattcctaaatcctcgaggagaacttctagtatatctacatacctaatattattgccttattaaaaatggaatcccaacaattacatcaaaatccacattctcttcaaaatcaattgtcctgtacttccttgttcatgtgtgttcaaaaacgttatatttataggataattatactctatttctcaacaagtaattggttgtttggccgagcggtctaaggcgcctgattcaagaaatatcttgaccgcagttaactgtgggaatactcaggtatcgtaagatgcaagagttcgaatctcttagcaaccattatttttttcctcaacataacgagaacacacaggggcgctatcgcacagaatcaaattcgatgactggaaattttttgttaatttcagaggtcgcctgacgcatatacctttttcaactgaaaaattgggagaaaaaggaaaggtgagagccgcggaaccggcttttcatatagaatagagaagcgttcatgactaaatgcttgcatcacaatacttgaagttgacaatattatttaaggacctattgttttttccaataggtggttagcaatcgtcttactttctaacttttcttaccttttacatttcagcaatatatatatatatatttcaaggatataccattctaatgtctgcccctaagaagatcgtcgttttgccaggtgaccacgttggtcaagaaatcacagccgaagccattaaggttcttaaagctatttctgatgttcgttccaatgtcaagttcgatttcgaaaatcatttaattggtggtgctgctatcgatgctacaggtgtcccacttccagatgaggcgctggaagcctccaagaaggttgatgccgttttgttaggtgctgtgggtggtcctaaatggggtaccggtagtgttagacctgaacaaggtttactaaaaatccgtaaagaacttcaattgtacgccaacttaagaccatgtaactttgcatccgactctcttttagacttatctccaatcaagccacaatttgctaaaggtactgacttcgttgttgtcagagaattagtgggaggtatttactttggtaagagaaaggaagacgatggtgatggtgtcgcttgggatagtgaacaatacaccgttccagaagtgcaaagaatcacaagaatggccgctttcatggccctacaacatgagccaccattgcctatttggtccttggataaagctaatgttttggcctcttcaagattatggagaaaaactgtggaggaaaccatcaagaacgaattccctacattgaaggttcaacatcaattgattgattctgccgccatgatcctagttaagaacccaacccacctaaatggtattataatcaccagcaacatgtttggtgatatcatctccgatgaagcctccgttatcccaggttccttgggtttgttgccatctgcgtccttggcctctttgccagacaagaacaccgcatttggtttgtacgaaccatgccacggttctgctccagatttgccaaagaataaggtcaaccctatcgccactatcttgtctgctgcaatgatgttgaaattgtcattgaacttgcctgaagaaggtaaggccattgaagatgcagttaaaaaggttttggatgcaggtatcagaactggtgatttaggtggttccaacagtaccacggaagtcggtgatgctgtcgccgaagaagttaagaaaatccttgcttaaaaagattctctttttttatgatatttgtacataaactttataaatgaaattcataatagaaacgacacgaaattacaaaatggaatatgttcatagggtagacgaaactatatacgcaatctacatacatttatcaagaaggagaaaaaggaggatgtaaaggaatacaggtaagcaaattgatactaatggctcaacgtgataaggaaaaagaattgcactttaacattaatattgacaaggaggagggcaccacacaaaaagttaggtgtaacagaaaatcatgaaactatgattcctaatttatatattggaggattttctctaaaaaaaaaaaaatacaacaaataaaaaacactcaatgacctgaccatttgatggagtttaagtcaataccttcttgaaccatttcccataatggtgaaagttccctcaagaattttactctgtcagaaacggccttaacgacgtagtcgacctcctcttcagtactaaatctaccaataccaaatctgatggaagaatgggctaatgcatcatccttacccagcgcatgtaaaacataagaaggttctagggaagcagatgtacaggctgaacccgaggataatgcgatatcccttagtgccatcaataaagattctccttccacgtaggcgaaagaaacgttaacacaccctggataacgatgatctggagatccgttcaacgtggtatgttcagcggataatagacctttgactaatttatcggatagtcttttgatgtgagcttggtcgttgtcaaattctttcttcatcaatctcgcagcttcaccaaatcccgctaccaatgggggggccaaagtaccagatctgctgcattaatgaatcggccaacgcgcggggagaggcggtttgcgtattgggcgctcttccgcttcctcgctcactgactcgctgcgctcggtcgttcggctgcggcgagcggtatcagcatcgatgaattccacggactatagactatactagtatactccgtctactgtacgatacacttccgctcaggtccttgtcctttaacgaggccttaccactcttttgttactctattgatccagctcagcaaaggcagtgtgatctaagattctatcttcgcgatgtagtaaaactagctagaccgagaaagagactagaaatgcaaaaggcacttctacaatggctgccatcattattatccgatgtgacgctgcagcttctcaatgatattcgaatacgctttgaggagatacagcctaatatccgacaaactgttttacagatttacgatcgtacttgttacccatcattgaattttgaacatccgaacctgggagttttccctgaaacagatagtatatttgaacctgtataataatatatagtctagcgctttacggaagacaatgtatgtatttcggttcctggagaaactattgcatctattgcataggtaatcttgcacgtcgcatccccggttcattttctgcgtttccatcttgcacttcaatagcatatctttgttaacgaagcatctgtgcttcattttgtagaacaaaaatgcaacgcgagagcgctaatttttcaaacaaagaatctgagctgcatttttacagaacagaaatgcaacgcgaaagcgctattttaccaacgaagaatctgtgcttcatttttgtaaaacaaaaatgcaacgcgagagcgctaatttttcaaacaaagaatctgagctgcatttttacagaacagaaatgcaacgcgagagcgctattttaccaacaaagaatctatacttcttttttgttctacaaaaatgcatcccgagagcgctatttttctaacaaagcatcttagattactttttttctcctttgtgcgctctataatgcagtctcttgataactttttgcactgtaggtccgttaaggttagaagaaggctactttggtgtctattttctcttccataaaaaaagcctgactccacttcccgcgtttactgattactagcgaagctgcgggtgcattttttcaagataaaggcatccccgattatattctataccgatgtggattgcgcatactttgtgaacagaaagtgatagcgttgatgattcttcattggtcagaaaattatgaacggtttcttctattttgtctctatatactacgtataggaaatgtttacattttcgtattgttttcgattcactctatgaatagttcttactacaatttttttgtctaaagagtaatactagagataaacataaaaaatgtagaggtcgagtttagatgcaagttcaaggagcgaaaggtggatgggtaggttatatagggatatagcacagagatatatagcaaagagatacttttgagcaatgtttgtggaagcggtattcgcaatattttagtagctcgttacagtccggtgcgtttttggttttttgaaagtgcgtcttcagagcgcttttggttttcaaaagcgctctgaagttcctatactttctagagaataggaacttcggaataggaacttcaaagcgtttccgaaaacgagcgcttccgaaaatgcaacgcgagctgcgcacatacagctcactgttcacgtcgcacctatatctgcgtgttgcctgtatatatatatacatgagaagaacggcatagtgcgtgtttatgcttaaatgcgtacttatatgcgtctatttatgtaggatgaaaggtagtctagtacctcctgtgatattatcccattccatgcggggtatcgtatgcttccttcagcactaccctttagctgttctatatgctgccactcctcaattggattagtctcatccttcaatgctatcatttcctttgatattggatcatatgcatagtaccgagaaactagtgcgaagtagtgatcaggtattgctgttatctgatgagtatacgttgtcctggccacggcagaagcacgcttatcgctccaatttcccacaacattagtcaactccgttaggcccttcattgaaagaaatgaggtcatcaaatgtcttccaatgtgagattttgggccattttttatagcaaagattgaataaggcgcatttttcttcaaagctttattgtacgatctgactaagttatcttttaataattggtattcctgtttattgcttgaagaattgccggtcctatttactcgttttaggactggttcagaattcatcgatgctcactcaaaggtcggtaatacggttatccacagaatcaggggataacgcaggaaagaac

SEQ ID NO: 363 - DNA, 13011 bp, Artificial sequence
  pCLS12110
atgtgagcaaaaggccagcaaaaggccaggaaccgtaaaaaggccgcgttgctggcgtttttccataggctccgcccccctgacgagcatcacaaaaatcgacgctcaagtcagaggtggcgaaacccgacaggactataaagataccaggcgtttccccctggaagctccctcgtgcgctctcctgttccgaccctgccgcttaccggatacctgtccgcctttctcccttcgggaagcgtggcgctttctcatagctcacgctgtaggtatctcagttcggtgtaggtcgttcgctccaagctgggctgtgtgcacgaaccccccgttcagcccgaccgctgcgccttatccggtaactatcgtcttgagtccaacccggtaagacacgacttatcgccactggcagcagccactggtaacaggattagcagagcgaggtatgtaggcggtgctacagagttcttgaagtggtggcctaactacggctacactagaaggacagtatttggtatctgcgctctgctgaagccagttaccttcggaaaaagagttggtagctcttgatccggcaaacaaaccaccgctggtagcggtggtttttttgtttgcaagcagcagattacgcgcagaaaaaaaggatctcaagaagatcctttgatcttttctacggggtctgacgctcagtggaacgaaaactcacgttaagggattttggtcatgagattatcaaaaaggatcttcacctagatccttttaaattaaaaatgaagttttaaatcaatctaaagtatatatgagtaaacttggtctgacagttaccaatgcttaatcagtgaggcacctatctcagcgatctgtctatttcgttcatccatagttgcctgactccccgtcgtgtagataactacgatacgggagggcttaccatctggccccagtgctgcaatgataccgcgagacccacgctcaccggctccagatttatcagcaataaaccagccagccggaagggccgagcgcagaagtggtcctgcaactttatccgcctccatccagtctattaattgttgccgggaagctagagtaagtagttcgccagttaatagtttgcgcaacgttgttgccattgctacaggcatcgtggtgtcacgctcgtcgtttggtatggcttcattcagctccggttcccaacgatcaaggcgagttacatgatcccccatgttgtgcaaaaaagcggttagctccttcggtcctccgatcgttgtcagaagtaagttggccgcagtgttatcactcatggttatggcagcactgcataattctcttactgtcatgccatccgtaagatgcttttctgtgactggtgagtactcaaccaagtcattctgagaatagtgtatgcggcgaccgagttgctcttgcccggcgtcaatacgggataataccgcgccacatagcagaactttaaaagtgctcatcattggaaaacgttcttcggggcgaaaactctcaaggatcttaccgctgttgagatccagttcgatgtaacccactcgtgcacccaactgatcttcagcatcttttactttcaccagcgtttctgggtgagcaaaaacaggaaggcaaaatgccgcaaaaaagggaataagggcgacacggaaatgttgaatactcatactcttcctttttcaatattattgaagcatttatcagggttattgtctcatgagcggatacatatttgaatgtatttagaaaaataaacaaataggggttccgcgcacatttccccgaaaagtgccacctgacgtccgatcaaaaatcatcgcttcgctgattaattaccccagaaataaggctaaaaaactaatcgcattatcatcctatggttgttaatttgattcgttcatttgaaggtttgtggggccaggttactgccaatttttcctcttcataaccataaaagctagtattgtagaatctttattgttcggagcagtgcggcgcgaggcacatctgcgtttcaggaacgcgaccggtgaagacgaggacgcacggaggagagtcttccttcggagggctgtcacccgctcggcggcttctaatccgtacttcaatatagcaatgagcagttaagcgtattactgaaagttccaaagagaaggtttttttaggctaatcgacctcgagcagatccgccaggcgtgtatatagcgtggatggccaggcaactttagtgctgacacatacaggcatatatatatgtgtgcgacgacacatgatcatatggcatgcatgtgctctgtatgtatataaaactcttgttttcttcttttctctaaatattctttccttatacattaggtcctttgtagcataaattactatacttctatagacacgcaaacacaaatacacagcggccttgccaccatggtggatctacgcacgctcggctacagccagcagcaacaggagaagatcaaaccgaaggttcgttcgacagtggcgcagcaccacgaggcactggtcggccacgggtttacacacgcgcacatcgttgcgttaagccaacacccggcagcgttagggaccgtcgctgtcaagtatcaggacatgatcgcagcgttgccagaggcgacacacgaagcgatcgttggcgtcggcaaacagtggtccggcgcacgcgctctggaggccttgctcacggtggcgggagagttgagaggtccaccgttacagttggacacaggccaacttctcaagattgcaaaacgtggcggcgtgaccgcagtggaggcagtgcatgcatggcgcaatgcactgacgggtgccccgctcaacttgaccccccagcaggtggtggccatcgccagcaataatggtggcaagcaggcgctggagacggtccagcggctgttgccggtgctgtgccaggcccacggcttgaccccccagcaggtggtggccatcgccagcaatggcggtggcaagcaggcgctggagacggtccagcggctgttgccggtgctgtgccaggcccacggcttgaccccccagcaggtggtggccatcgccagcaatggcggtggcaagcaggcgctggagacggtccagcggctgttgccggtgctgtgccaggcccacggcttgaccccccagcaggtggtggccatcgccagcaatggcggtggcaagcaggcgctggagacggtccagcggctgttgccggtgctgtgccaggcccacggcttgaccccggagcaggtggtggccatcgccagcaatattggtggcaagcaggcgctggagacggtgcaggcgctgttgccggtgctgtgccaggcccacggcttgaccccccagcaggtggtggccatcgccagcaatggcggtggcaagcaggcgctggagacggtccagcggctgttgccggtgctgtgccaggcccacggcttgaccccccagcaggtggtggccatcgccagcaataatggtggcaagcaggcgctggagacggtccagcggctgttgccggtgctgtgccaggcccacggcttgaccccccagcaggtggtggccatcgccagcaataatggtggcaagcaggcgctggagacggtccagcggctgttgccggtgctgtgccaggcccacggcttgaccccccagcaggtggtggccatcgccagcaatggcggtggcaagcaggcgctggagacggtccagcggctgttgccggtgctgtgccaggcccacggcttgaccccccagcaggtggtggccatcgccagcaatggcggtggcaagcaggcgctggagacggtccagcggctgttgccggtgctgtgccaggcccacggcttgaccccggagcaggtggtggccatcgccagcaatattggtggcaagcaggcgctggagacggtgcaggcgctgttgccggtgctgtgccaggcccacggcttgaccccggagcaggtggtggccatcgccagccacgatggcggcaagcaggcgctggagacggtccagcggctgttgccggtgctgtgccaggcccacggcttgaccccccagcaggtggtggccatcgccagcaatggcggtggcaagcaggcgctggagacggtccagcggctgttgccggtgctgtgccaggcccacggcttgaccccccagcaggtggtggccatcgccagcaatggcggtggcaagcaggcgctggagacggtccagcggctgttgccggtgctgtgccaggcccacggcttgaccccggagcaggtggtggccatcgccagcaatattggtggcaagcaggcgctggagacggtgcaggcgctgttgccggtgctgtgccaggcccacggcttgacccctcagcaggtggtggccatcgccagcaatggcggcggcaggccggcgctggagagcattgttgcccagttatctcgccctgatccgggatcctccggatctaaacgcaacaaaccaggtaaggccactggcaaaggtaaaccagtgaacaataagtggctgaacaacgctggcaaagacttgggttctccagtgccggatcgcattgccaacaagctgagagacaaagaattcaagagttttgatgactttcgcgcaaaattctgggaagaagtgtctaaagatccagaactgtctaaacagtttagtcgcaacaacaatgacagaatgaaagttggtaaagctccgaagacccgcacccaagacgtgtctggcaaacgcaccagttttgaattgcatcatgaaaaaccaatctctcagaatggtggcgtttacgacatggacaacatctctgtggttactccgaaaagacatatcgatattcatcgcggtaaaggatccaccggtggatcctccggagtggatctacgcacgctcggctacagccagcagcaacaggagaagatcaaaccgaaggttcgttcgacagtggcgcagcaccacgaggcactggtcggccacgggtttacacacgcgcacatcgttgcgttaagccaacacccggcagcgttagggaccgtcgctgtcaagtatcaggacatgatcgcagcgttgccagaggcgacacacgaagcgatcgttggcgtcggcaaacagtggtccggcgcacgcgctctggaggccttgctcacggtggcgggagagttgagaggtccaccgttacagttggacacaggccaacttctcaagattgcaaaacgtggcggcgtgaccgcagtggaggcagtgcatgcatggcgcaatgcactgacgggtgccccgctcaacttgaccccggagcaggtggtggccatcgccagccacgatggcggcaagcaggcgctggagacggtccagcggctgttgccggtgctgtgccaggcccacggcttgaccccccagcaggtggtggccatcgccagcaatggcggtggcaagcaggcgctggagacggtccagcggctgttgccggtgctgtgccaggcccacggcttgaccccggagcaggtggtggccatcgccagcaatattggtggcaagcaggcgctggagacggtgcaggcgctgttgccggtgctgtgccaggcccacggcttgaccccccagcaggtggtggccatcgccagcaatggcggtggcaagcaggcgctggagacggtccagcggctgttgccggtgctgtgccaggcccacggcttgaccccggagcaggtggtggccatcgccagcaatattggtggcaagcaggcgctggagacggtgcaggcgctgttgccggtgctgtgccaggcccacggcttgaccccggagcaggtggtggccatcgccagcaatattggtggcaagcaggcgctggagacggtgcaggcgctgttgccggtgctgtgccaggcccacggcttgaccccggagcaggtggtggccatcgccagcaatattggtggcaagcaggcgctggagacggtgcaggcgctgttgccggtgctgtgccaggcccacggcttgaccccggagcaggtggtggccatcgccagccacgatggcggcaagcaggcgctggagacggtccagcggctgttgccggtgctgtgccaggcccacggcttgaccccggagcaggtggtggccatcgccagccacgatggcggcaagcaggcgctggagacggtccagcggctgttgccggtgctgtgccaggcccacggcttgaccccccagcaggtggtggccatcgccagcaatggcggtggcaagcaggcgctggagacggtccagcggctgttgccggtgctgtgccaggcccacggcttgaccccggagcaggtggtggccatcgccagcaatattggtggcaagcaggcgctggagacggtgcaggcgctgttgccggtgctgtgccaggcccacggcttgaccccggagcaggtggtggccatcgccagcaatattggtggcaagcaggcgctggagacggtgcaggcgctgttgccggtgctgtgccaggcccacggcttgaccccggagcaggtggtggccatcgccagccacgatggcggcaagcaggcgctggagacggtccagcggctgttgccggtgctgtgccaggcccacggcttgaccccggagcaggtggtggccatcgccagccacgatggcggcaagcaggcgctggagacggtccagcggctgttgccggtgctgtgccaggcccacggcttgaccccggagcaggtggtggccatcgccagccacgatggcggcaagcaggcgctggagacggtccagcggctgttgccggtgctgtgccaggcccacggcttgaccccccagcaggtggtggccatcgccagcaatggcggtggcaagcaggcgctggagacggtccagcggctgttgccggtgctgtgccaggcccacggcttgaccccggagcaggtggtggccatcgccagccacgatggcggcaagcaggcgctggagacggtccagcggctgttgccggtgctgtgccaggcccacggcttgacccctcagcaggtggtggccatcgccagcaatggcggcggcaggccggcgctggagagcattgttgcccagttatctcgccctgatccgtcggccgactgataactcgagcgatcctctagacgagctcctcgagcctgcagcagctgaagctttggacttcttcgccagaggtttggtcaagtctccaatcaaggttgtcggcttgtctaccttgccagaaatttacgaaaagatggaaaagggtcaaatcgttggtagatacgttgttgacacttctaaataagcgaatttcttatgatttatgatttttattattaaataagttataaaaaaaataagtgtatacaaattttaaagtgactcttaggttttaaaacgaaaattcttattcttgagtaactctttcctgtaggtcaggttgctttctcaggtatagcatgaggtcgctcttattgaccacacctctaccggcatgcaagcttggcgtaatcatggtcatagctgtttcctgtgtgaaattgttatccgctcacaattccacacaacatacgagccggaagcataaagtgtaaagcctggggtgcctaatgagtgagctaactcacattaattgcgttgcgctcactgcccgctttccagtcgggaaacctgtcgtgccagcagatctattacattatgggtggtatgttggaataaaaatcaactatcatctactaactagtatttacgttactagtatattatcatatacggtgttagaagatgacgcaaatgatgagaaatagtcatctaaattagtggaagctgaaacgcaaggattgataatgtaataggatcaatgaatattaacatataaaatgatgataataatatttatagaattgtgtagaattgcagattcccttttatggattcctaaatcctcgaggagaacttctagtatatctacatacctaatattattgccttattaaaaatggaatcccaacaattacatcaaaatccacattctcttcaaaatcaattgtcctgtacttccttgttcatgtgtgttcaaaaacgttatatttataggataattatactctatttctcaacaagtaattggttgtttggccgagcggtctaaggcgcctgattcaagaaatatcttgaccgcagttaactgtgggaatactcaggtatcgtaagatgcaagagttcgaatctcttagcaaccattatttttttcctcaacataacgagaacacacaggggcgctatcgcacagaatcaaattcgatgactggaaattttttgttaatttcagaggtcgcctgacgcatatacctttttcaactgaaaaattgggagaaaaaggaaaggtgagagccgcggaaccggcttttcatatagaatagagaagcgttcatgactaaatgcttgcatcacaatacttgaagttgacaatattatttaaggacctattgttttttccaataggtggttagcaatcgtcttactttctaacttttcttaccttttacatttcagcaatatatatatatatatttcaaggatataccattctaatgtctgcccctaagaagatcgtcgttttgccaggtgaccacgttggtcaagaaatcacagccgaagccattaaggttcttaaagctatttctgatgttcgttccaatgtcaagttcgatttcgaaaatcatttaattggtggtgctgctatcgatgctacaggtgtcccacttccagatgaggcgctggaagcctccaagaaggttgatgccgttttgttaggtgctgtgggtggtcctaaatggggtaccggtagtgttagacctgaacaaggtttactaaaaatccgtaaagaacttcaattgtacgccaacttaagaccatgtaactttgcatccgactctcttttagacttatctccaatcaagccacaatttgctaaaggtactgacttcgttgttgtcagagaattagtgggaggtatttactttggtaagagaaaggaagacgatggtgatggtgtcgcttgggatagtgaacaatacaccgttccagaagtgcaaagaatcacaagaatggccgctttcatggccctacaacatgagccaccattgcctatttggtccttggataaagctaatgttttggcctcttcaagattatggagaaaaactgtggaggaaaccatcaagaacgaattccctacattgaaggttcaacatcaattgattgattctgccgccatgatcctagttaagaacccaacccacctaaatggtattataatcaccagcaacatgtttggtgatatcatctccgatgaagcctccgttatcccaggttccttgggtttgttgccatctgcgtccttggcctctttgccagacaagaacaccgcatttggtttgtacgaaccatgccacggttctgctccagatttgccaaagaataaggtcaaccctatcgccactatcttgtctgctgcaatgatgttgaaattgtcattgaacttgcctgaagaaggtaaggccattgaagatgcagttaaaaaggttttggatgcaggtatcagaactggtgatttaggtggttccaacagtaccacggaagtcggtgatgctgtcgccgaagaagttaagaaaatccttgcttaaaaagattctctttttttatgatatttgtacataaactttataaatgaaattcataatagaaacgacacgaaattacaaaatggaatatgttcatagggtagacgaaactatatacgcaatctacatacatttatcaagaaggagaaaaaggaggatgtaaaggaatacaggtaagcaaattgatactaatggctcaacgtgataaggaaaaagaattgcactttaacattaatattgacaaggaggagggcaccacacaaaaagttaggtgtaacagaaaatcatgaaactatgattcctaatttatatattggaggattttctctaaaaaaaaaaaaatacaacaaataaaaaacactcaatgacctgaccatttgatggagtttaagtcaataccttcttgaaccatttcccataatggtgaaagttccctcaagaattttactctgtcagaaacggccttaacgacgtagtcgacctcctcttcagtactaaatctaccaataccaaatctgatggaagaatgggctaatgcatcatccttacccagcgcatgtaaaacataagaaggttctagggaagcagatgtacaggctgaacccgaggataatgcgatatcccttagtgccatcaataaagattctccttccacgtaggcgaaagaaacgttaacacaccctggataacgatgatctggagatccgttcaacgtggtatgttcagcggataatagacctttgactaatttatcggatagtcttttgatgtgagcttggtcgttgtcaaattctttcttcatcaatctcgcagcttcaccaaatcccgctaccaatgggggggccaaagtaccagatctgctgcattaatgaatcggccaacgcgcggggagaggcggtttgcgtattgggcgctcttccgcttcctcgctcactgactcgctgcgctcggtcgttcggctgcggcgagcggtatcagcatcgatgaattccacggactatagactatactagtatactccgtctactgtacgatacacttccgctcaggtccttgtcctttaacgaggccttaccactcttttgttactctattgatccagctcagcaaaggcagtgtgatctaagattctatcttcgcgatgtagtaaaactagctagaccgagaaagagactagaaatgcaaaaggcacttctacaatggctgccatcattattatccgatgtgacgctgcagcttctcaatgatattcgaatacgctttgaggagatacagcctaatatccgacaaactgttttacagatttacgatcgtacttgttacccatcattgaattttgaacatccgaacctgggagttttccctgaaacagatagtatatttgaacctgtataataatatatagtctagcgctttacggaagacaatgtatgtatttcggttcctggagaaactattgcatctattgcataggtaatcttgcacgtcgcatccccggttcattttctgcgtttccatcttgcacttcaatagcatatctttgttaacgaagcatctgtgcttcattttgtagaacaaaaatgcaacgcgagagcgctaatttttcaaacaaagaatctgagctgcatttttacagaacagaaatgcaacgcgaaagcgctattttaccaacgaagaatctgtgcttcatttttgtaaaacaaaaatgcaacgcgagagcgctaatttttcaaacaaagaatctgagctgcatttttacagaacagaaatgcaacgcgagagcgctattttaccaacaaagaatctatacttcttttttgttctacaaaaatgcatcccgagagcgctatttttctaacaaagcatcttagattactttttttctcctttgtgcgctctataatgcagtctcttgataactttttgcactgtaggtccgttaaggttagaagaaggctactttggtgtctattttctcttccataaaaaaagcctgactccacttcccgcgtttactgattactagcgaagctgcgggtgcattttttcaagataaaggcatccccgattatattctataccgatgtggattgcgcatactttgtgaacagaaagtgatagcgttgatgattcttcattggtcagaaaattatgaacggtttcttctattttgtctctatatactacgtataggaaatgtttacattttcgtattgttttcgattcactctatgaatagttcttactacaatttttttgtctaaagagtaatactagagataaacataaaaaatgtagaggtcgagtttagatgcaagttcaaggagcgaaaggtggatgggtaggttatatagggatatagcacagagatatatagcaaagagatacttttgagcaatgtttgtggaagcggtattcgcaatattttagtagctcgttacagtccggtgcgtttttggttttttgaaagtgcgtcttcagagcgcttttggttttcaaaagcgctctgaagttcctatactttctagagaataggaacttcggaataggaacttcaaagcgtttccgaaaacgagcgcttccgaaaatgcaacgcgagctgcgcacatacagctcactgttcacgtcgcacctatatctgcgtgttgcctgtatatatatatacatgagaagaacggcatagtgcgtgtttatgcttaaatgcgtacttatatgcgtctatttatgtaggatgaaaggtagtctagtacctcctgtgatattatcccattccatgcggggtatcgtatgcttccttcagcactaccctttagctgttctatatgctgccactcctcaattggattagtctcatccttcaatgctatcatttcctttgatattggatcatatgcatagtaccgagaaactagtgcgaagtagtgatcaggtattgctgttatctgatgagtatacgttgtcctggccacggcagaagcacgcttatcgctccaatttcccacaacattagtcaactccgttaggcccttcattgaaagaaatgaggtcatcaaatgtcttccaatgtgagattttgggccattttttatagcaaagattgaataaggcgcatttttcttcaaagctttattgtacgatctgactaagttatcttttaataattggtattcctgtttattgcttgaagaattgccggtcctatttactcgttttaggactggttcagaattcatcgatgctcactcaaaggtcggtaatacggttatccacagaatcaggggataacgcaggaaagaac

SEQ ID NO: 364 - DNA, 5594 bp, Artificial sequence
  pCLS15802
ggtctttcctgcgttatcccctgattctgtggataaccgtattaccgcctttgagtgagctgataccgctcgccgcagccgaacgaccgagcgcagcgagtcagtgagcgaggaagcggagagcgcccaatacgcaaaccgcctctccccgcgcgttggccgattcattaatgcagctggcacgacaggtttcccgactggaaagcgggcagtgagcgcaacgcaattaatgtgagttagctcactcattaggcaccccaggctttacactttatgcttccggctcgtatgttgtgtggaattgtgagcggataacaatttcacacaggaaacagctatgaccatgattacgccaagcgcgtcaattaaccctcactaaagggaacaaaagctgttaattaagcgcgccacacgcaaacacaaatacacagcggccttgccaccatggtggatctacgcacgctcggctacagccagcagcaacaggagaagatcaaaccgaaggttcgttcgacagtggcgcagcaccacgaggcactggtcggccacgggtttacacacgcgcacatcgttgcgttaagccaacacccggcagcgttagggaccgtcgctgtcaagtatcaggacatgatcgcagcgttgccagaggcgacacacgaagcgatcgttggcgtcggcaaacagtggtccggcgcacgcgctctggaggccttgctcacggtggcgggagagttgagaggtccaccgttacagttggacacaggccaacttctcaagattgcaaaacgtggcggcgtgaccgcagtggaggcagtgcatgcatggcgcaatgcactgacgggtgccccgctcaacttgaccccccagcaggtggtggccatcgccagcaataatggtggcaagcaggcgctggagacggtccagcggctgttgccggtgctgtgccaggcccacggcttgaccccccagcaggtggtggccatcgccagcaatggcggtggcaagcaggcgctggagacggtccagcggctgttgccggtgctgtgccaggcccacggcttgaccccccagcaggtggtggccatcgccagcaatggcggtggcaagcaggcgctggagacggtccagcggctgttgccggtgctgtgccaggcccacggcttgaccccccagcaggtggtggccatcgccagcaatggcggtggcaagcaggcgctggagacggtccagcggctgttgccggtgctgtgccaggcccacggcttgaccccggagcaggtggtggccatcgccagcaatattggtggcaagcaggcgctggagacggtgcaggcgctgttgccggtgctgtgccaggcccacggcttgaccccccagcaggtggtggccatcgccagcaatggcggtggcaagcaggcgctggagacggtccagcggctgttgccggtgctgtgccaggcccacggcttgaccccccagcaggtggtggccatcgccagcaataatggtggcaagcaggcgctggagacggtccagcggctgttgccggtgctgtgccaggcccacggcttgaccccccagcaggtggtggccatcgccagcaataatggtggcaagcaggcgctggagacggtccagcggctgttgccggtgctgtgccaggcccacggcttgaccccccagcaggtggtggccatcgccagcaatggcggtggcaagcaggcgctggagacggtccagcggctgttgccggtgctgtgccaggcccacggcttgaccccccagcaggtggtggccatcgccagcaatggcggtggcaagcaggcgctggagacggtccagcggctgttgccggtgctgtgccaggcccacggcttgaccccggagcaggtggtggccatcgccagcaatattggtggcaagcaggcgctggagacggtgcaggcgctgttgccggtgctgtgccaggcccacggcttgaccccggagcaggtggtggccatcgccagccacgatggcggcaagcaggcgctggagacggtccagcggctgttgccggtgctgtgccaggcccacggcttgaccccccagcaggtggtggccatcgccagcaatggcggtggcaagcaggcgctggagacggtccagcggctgttgccggtgctgtgccaggcccacggcttgaccccccagcaggtggtggccatcgccagcaatggcggtggcaagcaggcgctggagacggtccagcggctgttgccggtgctgtgccaggcccacggcttgaccccggagcaggtggtggccatcgccagcaatattggtggcaagcaggcgctggagacggtgcaggcgctgttgccggtgctgtgccaggcccacggcttgacccctcagcaggtggtggccatcgccagcaatggcggcggcaggccggcgctggagagcattgttgcccagttatctcgccctgatccgggatccaagtctggcatctaccagattaagaacaccctgaataacaaagtgtatgttggatctgccaaggactttgagaaaagatggaagaggcacttcaaggatctggaaaagggttgccacagctccatcaagctccaaaggtctttcaacaaacatggcaatgtctttgagtgctccattttggaagagatcccttatgaaaaggacctcattatagagagggaaaacttctggatcaaggagctgaactcaaaaatcaatggatacaacattgcagatgccacatttggtgacacctgttctactcacccccttaaggaagagatcattaaaaagaggtctgagactgtgaaggctaagatgttgaaactggggcctgatggcagaaaggcactctactctaagccaggtagcaaaaatggaaggtggaaccctgagacccacaagttctgcaaatgtggggtgagaatacagacatcagcctacacttgcagcaagtgtaggaacagatcaggagagaataactcctttttcaaccacaagcattctcaaggtccatcggccgactgataagtcgaccaccaccaccaccaccactgataagagctcctcgagcctgcagcagctgaagctttggacttctggcgcgcccaattcgccctatagtgagtcgtattacgtcgcgctcactggccgtcgttttacaacgtcgtgactgggaaaaccctggcgttacccaacttaatcgccttgcagcacatccccctttcgccagctggcgtaatagcgaagaggcccgcaccgaaacgcccttcccaacagttgcgcagcctgaatggcgaatgggagcgccctgtagcggcgcattaagcgcggcgggtgtggtggttacgcgcagcgtgaccgctacacttgccagcgccctagcgcccgctcctttcgctttcttcccttcctttctcgccacgttcgccggctttccccgtcaagctctaaatcgggggctccctttagggttccgatttagtgctttacggcacctcgaccccaaaaaacttgattagggtgatggttggcctgtagtgggccatagccctgatagacggtttttcgccctttgacgttggagtccacgttctttaatagtggactcttgttccaaactggaacaacactcaaccctatctcggtctattcttttgatttataagggattttgccgatttcggcctattggttaaaaaatgagctgatttaacaaaaatttaacgcgaattttaacaaaatattaacgcttacaatttaggtggcacttttcggggaaatgtgcgcggaacccctatttgtttatttttctaaatacattcaaatatgtatccgctcatgagacaataaccctgataaatgcttcaataatattgaaaaaggaagagtatgagtattcaacatttccgtgtcgcccttattcccttttttgcggcattttgccttcctgtttttgctcacccagaaacgctggtgaaagtaaaagatgctgaagatcagttgggtgcacgagtgggttacatcgaactggatctcaacagcggtaagatccttgagagttttcgccccgaagaacgttttccaatgatgagcacttttaaagttctgctatgtggcgcggtattatcccgtattgacgccgggcaagagcaactcggtcgccgcatacactattctcagaatgacttggttgagtactcaccagtcacagaaaagcatcttacggatggcatgacagtaagagaattatgcagtgctgccataaccatgagtgataacactgcggccaacttacttctgacaacgatcggaggaccgaaggagctaaccgcttttttgcacaacatgggggatcatgtaactcgccttgatcgttgggaaccggagctgaatgaagccataccaaacgacgagcgtgacaccacgatgcctgtagcaatggcaacaacgttgcgcaaactattaactggcgaactacttactctagcttcccggcaacaattaatagactggatggaggcggataaagttgcaggaccacttctgcgctcggcccttccggctggctggtttattgctgataaatctggagccggtgagcgtggttctcgcggtatcattgcagcactggggccagatggtaagccctcccgtatcgtagttatctacacgacggggagtcaggcaactatggatgaacgaaatagacagatcgctgagataggtgcctcactgattaagcattggtaactgtcagaccaagtttactcatatatactttagattgatttaaaacttcatttttaatttaaaaggatctaggtgaagatcctttttgataatctcatgaccaaaatcccttaacgtgagttttcgttccactgagcgtcagaccccgtagaaaagatcaaaggatcttcttgagatcctttttttctgcgcgtaatctgctgcttgcaaacaaaaaaaccaccgctaccagcggtggtttgtttgccggatcaagagctaccaactctttttccgaaggtaactggcttcagcagagcgcagataccaaatactgttcttctagtgtagccgtagttaggccaccacttcaagaactctgtagcaccgcctacatacctcgctctgctaatcctgttaccagtggctgctgccagtggcgataagtcgtgtcttaccgggttggactcaagacgatagttaccggataaggcgcagcggtcgggctgaacggggggttcgtgcacacagcccagcttggagcgaacgacctacaccgaactgagatacctacagcgtgagctatgagaaagcgccacgcttcccgaagggagaaaggcggacaggtatccggtaagcggcagggtcggaacaggagagcgcacgagggagcttccagggggaaacgcctggtatctttatagtcctgtcgggtttcgccacctctgacttgagcgtcgatttttgtgatgctcgtcaggggggcggagcctatggaaaaacgccagcaacgcggcctttttacggttcctggccttttgctggccttttgctcacat

SEQ ID NO: 365 - DNA, 8588 bp, Artificial sequence
  pCLS8990
atgtgagcaaaaggccagcaaaaggccaggaaccgtaaaaaggccgcgttgctggcgtttttccataggctccgcccccctgacgagcatcacaaaaatcgacgctcaagtcagaggtggcgaaacccgacaggactataaagataccaggcgtttccccctggaagctccctcgtgcgctctcctgttccgaccctgccgcttaccggatacctgtccgcctttctcccttcgggaagcgtggcgctttctcatagctcacgctgtaggtatctcagttcggtgtaggtcgttcgctccaagctgggctgtgtgcacgaaccccccgttcagcccgaccgctgcgccttatccggtaactatcgtcttgagtccaacccggtaagacacgacttatcgccactggcagcagccactggtaacaggattagcagagcgaggtatgtaggcggtgctacagagttcttgaagtggtggcctaactacggctacactagaaggacagtatttggtatctgcgctctgctgaagccagttaccttcggaaaaagagttggtagctcttgatccggcaaacaaaccaccgctggtagcggtggtttttttgtttgcaagcagcagattacgcgcagaaaaaaaggatctcaagaagatcctttgatcttttctacggggtctgacgctcagtggaacgaaaactcacgttaagggattttggtcatgagcggatacatatttgaatgtatttagaaaaataaacaaataggggttccgcgcacatttccccgaaaagtgccacctgacgtccgatcaaaaatcatcgcttcgctgattaattaccccagaaataaggctaaaaaactaatcgcattatcatcctatggttgttaatttgattcgttcatttgaaggtttgtggggccaggttactgccaatttttcctcttcataaccataaaagctagtattgtagaatctttattgttcggagcagtgcggcgcgaggcacatctgcgtttcaggaacgcgaccggtgaagacgaggacgcacggaggagagtcttccttcggagggctgtcacccgctcggcggcttctaatccgtacttcaatatagcaatgagcagttaagcgtattactgaaagttccaaagagaaggtttttttaggctaatcgacctcgagcagatccgccaggcgtgtatatagcgtggatggccaggcaactttagtgctgacacatacaggcatatatatatgtgtgcgacgacacatgatcatatggcatgcatgtgctctgtatgtatataaaactcttgttttcttcttttctctaaatattctttccttatacattaggtcctttgtagcataaattactatacttctatagacacgcaaacacaaatacacagcggccttgccaccatggtggatctacgcacgctcggctacagccagcagcaacaggagaagatcaaaccgaaggttcgttcgacagtggcgcagcaccacgaggcactggtcggccacgggtttacacacgcgcacatcgttgcgttaagccaacacccggcagcgttagggaccgtcgctgtcaagtatcaggacatgatcgcagcgttgccagaggcgacacacgaagcgatcgttggcgtcggcaaacagtggtccggcgcacgcgctctggaggccttgctcacggtggcgggagagttgagaggtccaccgttacagttggacacaggccaacttctcaagattgcaaaacgtggcggcgtgaccgcagtggaggcagtgcatgcatggcgcaatgcactgacgggtgccccgctcaacttgaccccccagcaggtggtggccatcgccagcaataatggtggcaagcaggcgctggagacggtccagcggctgttgccggtgctgtgccaggcccacggcttgaccccccagcaggtggtggccatcgccagcaatggcggtggcaagcaggcgctggagacggtccagcggctgttgccggtgctgtgccaggcccacggcttgaccccccagcaggtggtggccatcgccagcaatggcggtggcaagcaggcgctggagacggtccagcggctgttgccggtgctgtgccaggcccacggcttgaccccccagcaggtggtggccatcgccagcaatggcggtggcaagcaggcgctggagacggtccagcggctgttgccggtgctgtgccaggcccacggcttgaccccggagcaggtggtggccatcgccagcaatattggtggcaagcaggcgctggagacggtgcaggcgctgttgccggtgctgtgccaggcccacggcttgaccccccagcaggtggtggccatcgccagcaatggcggtggcaagcaggcgctggagacggtccagcggctgttgccggtgctgtgccaggcccacggcttgaccccccagcaggtggtggccatcgccagcaataatggtggcaagcaggcgctggagacggtccagcggctgttgccggtgctgtgccaggcccacggcttgaccccccagcaggtggtggccatcgccagcaataatggtggcaagcaggcgctggagacggtccagcggctgttgccggtgctgtgccaggcccacggcttgaccccccagcaggtggtggccatcgccagcaatggcggtggcaagcaggcgctggagacggtccagcggctgttgccggtgctgtgccaggcccacggcttgaccccccagcaggtggtggccatcgccagcaatggcggtggcaagcaggcgctggagacggtccagcggctgttgccggtgctgtgccaggcccacggcttgaccccggagcaggtggtggccatcgccagcaatattggtggcaagcaggcgctggagacggtgcaggcgctgttgccggtgctgtgccaggcccacggcttgaccccggagcaggtggtggccatcgccagccacgatggcggcaagcaggcgctggagacggtccagcggctgttgccggtgctgtgccaggcccacggcttgaccccccagcaggtggtggccatcgccagcaatggcggtggcaagcaggcgctggagacggtccagcggctgttgccggtgctgtgccaggcccacggcttgaccccccagcaggtggtggccatcgccagcaatggcggtggcaagcaggcgctggagacggtccagcggctgttgccggtgctgtgccaggcccacggcttgaccccggagcaggtggtggccatcgccagcaatattggtggcaagcaggcgctggagacggtgcaggcgctgttgccggtgctgtgccaggcccacggcttgacccctcagcaggtggtggccatcgccagcaatggcggcggcaggccggcgctggagagcattgttgcccagttatctcgccctgatccgggatccaagtctggcatctaccagattaagaacaccctgaataacaaagtgtatgttggatctgccaaggactttgagaaaagatggaagaggcacttcaaggatctggaaaagggttgccacagctccatcaagctccaaaggtctttcaacaaacatggcaatgtctttgagtgctccattttggaagagatcccttatgaaaaggacctcattatagagagggaaaacttctggatcaaggagctgaactcaaaaatcaatggatacaacattgcagatgccacatttggtgacacctgttctactcacccccttaaggaagagatcattaaaaagaggtctgagactgtgaaggctaagatgttgaaactggggcctgatggcagaaaggcactctactctaagccaggtagcaaaaatggaaggtggaaccctgagacccacaagttctgcaaatgtggggtgagaatacagacatcagcctacacttgcagcaagtgtaggaacagatcaggagagaataactcctttttcaaccacaagcattctcaaggtccatcggccgactgataactcgagcgatcctctagacgagctcctcgagcctgcagcagctgaagctttggacttcttcgccagaggtttggtcaagtctccaatcaaggttgtcggcttgtctaccttgccagaaatttacgaaaagatggaaaagggtcaaatcgttggtagatacgttgttgacacttctaaataagcgaatttcttatgatttatgatttttattattaaataagttataaaaaaaataagtgtatacaaattttaaagtgactcttaggttttaaaacgaaaattcttattcttgagtaactctttcctgtaggtcaggttgctttctcaggtatagcatgaggtcgctcttattgaccacacctctaccggcatgcaagcttggcgtaatcatggtcatagctgtttcctgtgtgaaattgttatccgctcacaattccacacaacatacgagccggaagcataaagtgtaaagcctggggtgcctaatgagtgagctaactcacattaattgcgttgcgctcactgcccgctttccagtcgggaaacctgtcgtgccagcagatctgtttagcttgcctcgtccccgccgggtcacccggccagcgacatggaggcccagaataccctccttgacagtcttgacgtgcgcagctcaggggcatgatgtgactgtcgcccgtacatttagcccatacatccccatgtataatcatttgcatccatacattttgatggccgcacggcgcgaagcaaaaattacggctcctcgctgcagacctgcgagcagggaaacgctcccctcacagacgcgttgaattgtccccacgccgcgcccctgtagagaaatataaaaggttaggatttgccactgaggttcttctttcatatacttccttttaaaatcttgctaggatacagttctcacatcacatccgaacataaacaaccatgcatgggtaaggaaaagactcacgtttcgaggccgcgattaaattccaacatggatgctgatttatatgggtataaatgggctcgcgataatgtcgggcaatcaggtgcgacaatctatcgattgtatgggaagcccgatgcgccagagttgtttctgaaacatggcaaaggtagcgttgccaatgatgttacagatgagatggtcagactaaactggctgacggaatttatgcctcttccgaccatcaagcattttatccgtactcctgatgatgcatggttactcaccactgcgatccccggcaaaacagcattccaggtattagaagaatatcctgattcaggtgaaaatattgttgatgcgctggcagtgttcctgcgccggttgcattcgattcctgtttgtaattgtccttttaacagcgatcgcgtatttcgcctcgctcaggcgcaatcacgaatgaataacggtttggttgatgcgagtgattttgatgacgagcgtaatggctggcctgttgaacaagtctggaaagaaatgcataagcttttgccattctcaccggattcagtcgtcactcatggtgatttctcacttgataaccttatttttgacgaggggaaattaataggttgtattgatgttggacgagtcggaatcgcagaccgataccaggatcttgccatcctatggaactgcctcggtgagttttctccttcattacagaaacggctttttcaaaaatatggtattgataatcctgatatgaataaattgcagtttcatttgatgctcgatgagtttttctaatcagtactgacaataaaaagattcttgttttcaagaacttgtcatttgtatagtttttttatattgtagttgttctattttaatcaaatgttagcgtgatttatattttttttcgcctcgacatcatctgcccagatgcgaagttaagtgcgcagaaagtaatatcatgcgtcaatcgtatgtgaatgctggtcgctatactgctgtcgattcgatactaacgccgccatccagtgtcgaaaacgagctcgaattcatcgatgatatcagatccactagtggcctatgcgaccgcggatctgccggtctccctatagtgagtcgtattaatttcgataagccaggttaacctgcattaatgaatcggccaacgcgcggggagaggcggtttgcgtattgggcgctcttccgcttcctcgctcactgactcgctgcgctcggtcgttcggctgcggcgagcggtatcagcatcgatgaattccacggactatagactatactagtatactccgtctactgtacgatacacttccgctcaggtccttgtcctttaacgaggccttaccactcttttgttactctattgatccagctcagcaaaggcagtgtgatctaagattctatcttcgcgatgtagtaaaactagctagaccgagaaagagactagaaatgcaaaaggcacttctacaatggctgccatcattattatccgatgtgacgctgcagcttctcaatgatattcgaatacgctttgaggagatacagcctaatatccgacaaactgttttacagatttacgatcgtacttgttacccatcattgaattttgaacatccgaacctgggagttttccctgaaacagatagtatatttgaacctgtataataatatatagtctagcgctttacggaagacaatgtatgtatttcggttcctggagaaactattgcatctattgcataggtaatcttgcacgtcgcatccccggttcattttctgcgtttccatcttgcacttcaatagcatatctttgttaacgaagcatctgtgcttcattttgtagaacaaaaatgcaacgcgagagcgctaatttttcaaacaaagaatctgagctgcatttttacagaacagaaatgcaacgcgaaagcgctattttaccaacgaagaatctgtgcttcatttttgtaaaacaaaaatgcaacgcgagagcgctaatttttcaaacaaagaatctgagctgcatttttacagaacagaaatgcaacgcgagagcgctattttaccaacaaagaatctatacttcttttttgttctacaaaaatgcatcccgagagcgctatttttctaacaaagcatcttagattactttttttctcctttgtgcgctctataatgcagtctcttgataactttttgcactgtaggtccgttaaggttagaagaaggctactttggtgtctattttctcttccataaaaaaagcctgactccacttcccgcgtttactgattactagcgaagctgcgggtgcattttttcaagataaaggcatccccgattatattctataccgatgtggattgcgcatactttgtgaacagaaagtgatagcgttgatgattcttcattggtcagaaaattatgaacggtttcttctattttgtctctatatactacgtataggaaatgtttacattttcgtattgttttcgattcactctatgaatagttcttactacaatttttttgtctaaagagtaatactagagataaacataaaaaatgtagaggtcgagtttagatgcaagttcaaggagcgaaaggtggatgggtaggttatatagggatatagcacagagatatatagcaaagagatacttttgagcaatgtttgtggaagcggtattcgcaatattttagtagctcgttacagtccggtgcgtttttggttttttgaaagtgcgtcttcagagcgcttttggttttcaaaagcgctctgaagttcctatactttctagagaataggaacttcggaataggaacttcaaagcgtttccgaaaacgagcgcttccgaaaatgcaacgcgagctgcgcacatacagctcactgttcacgtcgcacctatatctgcgtgttgcctgtatatatatatacatgagaagaacggcatagtgcgtgtttatgcttaaatgcgtacttatatgcgtctatttatgtaggatgaaaggtagtctagtacctcctgtgatattatcccattccatgcggggtatcgtatgcttccttcagcactaccctttagctgttctatatgctgccactcctcaattggattagtctcatccttcaatgctatcatttcctttgatattggatcatatgcatagtaccgagaaactagtgcgaagtagtgatcaggtattgctgttatctgatgagtatacgttgtcctggccacggcagaagcacgcttatcgctccaatttcccacaacattagtcaactccgttaggcccttcattgaaagaaatgaggtcatcaaatgtcttccaatgtgagattttgggccattttttatagcaaagattgaataaggcgcatttttcttcaaagctttattgtacgatctgactaagttatcttttaataattggtattcctgtttattgcttgaagaattgccggtcctatttactcgttttaggactggttcagaattcatcgatgctcactcaaaggtcggtaatacggttatccacagaatcaggggataacgcaggaaagaac

SEQ ID NO: 366 - protein, 582 aa, Artificial sequence
  Colicin-E9
MSGGDGRGHNTGAHSTSGNINGGPTGIGVSGGASDGSGWSSENNPWGGGSGSGIHWGGGSGRGNGGGNGNSGGGSGTGGNLSAVAAPVAFGFPALSTPGAGGLAVSISASELSAAIAGIIAKLKKVNLKFTPFGVVLSSLIPSEIAKDDPNMMSKIVTSLPADDITESPVSSLPLDKATVNVNVRVVDDVKDERQNISVVSGVPMSVPVVDAKPTERPGVFTASIPGAPVLNISVNDSTPAVQTLSPGVTNNTDKDVRPAGFTQGGNTRDAVIRFPKDSGHNAVYVSVSDVLSPDQVKQRQDEENRRQQEWDATHPVEAAERNYERARAELNQANEDVARNQERQAKAVQVYNSRKSELDAANKTLADAIAEIKQFNRFAHDPMAGGHRMWQMAGLKAQRAQTDVNNKQAAFDAAAKEKSDADAALSAAQERRKQKENKEKDAKDKLDKESKRNKPGKATGKGKPVGDKWLDDAGKDSGAPIPDRIADKLRDKEFKSFDDFRKAVWEEVSKDPELSKNLNPSNKSSVSKGYSPFTPKNQQVGGRKVYELHHDKPISQGGEVYDMDNIRVTTPKRHIDIHRGK

SEQ ID NO: 367 - protein, 511 aa, Artificial sequence
  APFL
MSGGFELQPRDGGPRVALAPGETVIGRGPLLGITDKRVSRRHAILEVAGGQLRIKPIHTNPCFYQSSEKSQLLPLKPNLWCYLNPGDSFSLLVDKYIFRILSIPSEVEMQCTLRNSQVLDEDNILNETPKSPVINLPHETTGASQLEGSTEIAKTQMTPTNSVSFLGENRDCNKQQPILAERKRILPTWMLAEHLSDQNLSVPAISGGNVIQGSGKEEICKDKSQLNTTQQGRRQLISSGSSENTSAEQDTGEECKNTDQEESTISSKEMPQSFSAITLSNTEMNNIKTNAQRNKLPIEELGKVSKHKIATKRTPHKEDEAMSCSENCSSAQGDSLQDESQGSHSESSSNPSNPETLHAKATDSVLQGSEGNKVKRTSCMYGANCYRKNPVHFQHFSHPGDSDYGGVQIVGQDETDDRPECPYGPSCYRKNPQHKIEYRHNTLPVRNVLDEDNDNVGQPNEYDLNDSFLDDEEEDYEPTDEDSDWEPGKEDEEKEDVEELLKEAKRFMKRK

SEQ ID NO: 368 - protein, 583 aa, Artificial sequence
  FokI wild-type
MFLSMVSKIRTFGWVQNPGKFENLKRVVQVFDRNSKVHNEVKNIKIPTLVKESKIQKELVAIMNQHDLIYTYKELVGTGTSIRSEAPCDAIIQATIADQGNKKGYIDNWSSDGFLRWAHALGFIEYINKSDSFVITDVGLAYSKSADGSAIEKEILIEAISSYPPAIRILTLLEDGQHLTKFDLGKNLGFSGESGFTSLPEGILLDTLANAMPKDKGEIRNNWEGSSDKYARMIGGWLDKLGLVKQGKKEFIIPTLGKPDNKEFISHAFKITGEGLKVLRRAKGSTKFTRVPKRVYWEMLATNLTDKEYVRTRRALILEILIKAGSLKIEQIQDNLKKLGFDEVIETIENDIKGLINTGIFIEIKGRFYQLKDHILQFVIPNRGVTKQLVKSELEEKKSELRHKLKYVPHEYIELIEIARNSTQDRILEMKVMEFFMKVYGYRGKHLGGSRKPDGAIYTVGSPIDYGVIVDTKAYSGGYNLPIGQADEMQRYVEENQTRNKHINPNEWWKVYPSSVTEFKFLFVSGHFKGNYKAQLTRLNHITNCNGAVLSVEELLIGGEMIKAGTLTLEEVRRKFNNGEINF

SEQ ID NO: 369 - protein, 86 aa, Artificial sequence [sequence omitted]

SEQ ID NO: 370 - protein, 1076 aa, Artificial sequence
  pCLS9082
MADPIRSRTPSPARELLPGPQPDGVQPTADRGVSPPAGGPLDGLPARRTMSRTRLPSPPAPSPAFSAGSFSDLLRQFDPSLFNTSLFDSLPPFGAHHTEAATGEWDEVQSGLRAADAPPPTMRVAVTAARPPRAKPAPRRRAAQPSDASPAAQVDLRTLGYSQQQQEKIKPKVRSTVAQHHEALVGHGFTHAHIVALSQHPAALGTVAVKYQDMIAALPEATHEAIVGVGKQWSGARALEALLTVAGELRGPPLQLDTGQLLKIAKRGGVTAVEAVHAWRNALTGAPLNLTPEQVVAIASHDGGKQALETVQRLLPVLCQAHGLTPQQVVAIASNGGGKQALETVQRLLPVLCQAHGLTPEQVVAIASNIGGKQALETVQALLPVLCQAHGLTPQQVVAIASNGGGKQALETVQRLLPVLCQAHGLTPEQVVAIASNIGGKQALETVQALLPVLCQAHGLTPEQVVAIASNIGGKQALETVQALLPVLCQAHGLTPEQVVAIASNIGGKQALETVQALLPVLCQAHGLTPEQVVAIASHDGGKQALETVQRLLPVLCQAHGLTPEQVVAIASHDGGKQALETVQRLLPVLCQAHGLTPQQVVAIASNGGGKQALETVQRLLPVLCQAHGLTPEQVVAIASNIGGKQALETVQALLPVLCQAHGLTPEQVVAIASNIGGKQALETVQALLPVLCQAHGLTPEQVVAIASHDGGKQALETVQRLLPVLCQAHGLTPEQVVAIASHDGGKQALETVQRLLPVLCQAHGLTPEQVVAIASHDGGKQALETVQRLLPVLCQAHGLTPQQVVAIASNGGGKQALETVQRLLPVLCQAHGLTPEQVVAIASHDGGKQALETVQRLLPVLCQAHGLTPQQVVAIASNGGGRPALESIVAQLSRPDPALAALTNDHLVALACLGGDPSGGSGSATSTKKLHKEPATLIKAIDGDTVKLMYKGQPMTFRLLLVDTPETKHPKKGVEKYGPEASAFTKKMVENAKKIEVEFDKGQRTDKYGRGLAYIYADGKMVNEALVRQGLAKVAYVYKPNNTHEQHLRKSEAQAKKEKLNIWSEDNADSGQAAD

SEQ ID NO: 371 - protein, 1088 aa, Artificial sequence
  pCLS9081
MADPIRSRTPSPARELLPGPQPDGVQPTADRGVSPPAGGPLDGLPARRTMSRTRLPSPPAPSPAFSAGSFSDLLRQFDPSLFNTSLFDSLPPFGAHHTEAATGEWDEVQSGLRAADAPPPTMRVAVTAARPPRAKPAPRRRAAQPSDASPAAQVDLRTLGYSQQQQEKIKPKVRSTVAQHHEALVGHGFTHAHIVALSQHPAALGTVAVKYQDMIAALPEATHEAIVGVGKQWSGARALEALLTVAGELRGPPLQLDTGQLLKIAKRGGVTAVEAVHAWRNALTGAPLNLTPEQVVAIASHDGGKQALETVQRLLPVLCQAHGLTPQQVVAIASNGGGKQALETVQRLLPVLCQAHGLTPEQVVAIASNIGGKQALETVQALLPVLCQAHGLTPQQVVAIASNGGGKQALETVQRLLPVLCQAHGLTPEQVVAIASNIGGKQALETVQALLPVLCQAHGLTPEQVVAIASNIGGKQALETVQALLPVLCQAHGLTPEQVVAIASNIGGKQALETVQALLPVLCQAHGLTPEQVVAIASHDGGKQALETVQRLLPVLCQAHGLTPEQVVAIASHDGGKQALETVQRLLPVLCQAHGLTPQQVVAIASNGGGKQALETVQRLLPVLCQAHGLTPEQVVAIASNIGGKQALETVQALLPVLCQAHGLTPEQVVAIASNIGGKQALETVQALLPVLCQAHGLTPEQVVAIASHDGGKQALETVQRLLPVLCQAHGLTPEQVVAIASHDGGKQALETVQRLLPVLCQAHGLTPEQVVAIASHDGGKQALETVQRLLPVLCQAHGLTPQQVVAIASNGGGKQALETVQRLLPVLCQAHGLTPEQVVAIASHDGGKQALETVQRLLPVLCQAHGLTPQQVVAIASNGGGRPALESIVAQLSRPDPALAALTNDHLVALACLGGRPALDAVKKGLGDPSGGSGSATSTKKLHKEPATLIKAIDGDTVKLMYKGQPMTFRLLLVDTPETKHPKKGVEKYGPEASAFTKKMVENAKKIEVEFDKGQRTDKYGRGLAYIYADGKMVNEALVRQGLAKVAYVYKPNNTHEQHLRKSEAQAKKEKLNIWSEDNADSGQAAD

SEQ ID NO: 372 - protein, 15 aa, Artificial sequence
  Linker_TAL1
SGGSGSNVGSGSGSG

SEQ ID NO: 373 - protein, 20 aa, Artificial sequence
  Linker_TAL2
SGGSGSLTTNLTAFSGSGSG

SEQ ID NO: 374 - protein, 22 aa, Artificial sequence
  Linker_TAL3
SGGSGSKRRTTISIAASGSGSG

SEQ ID NO: 375 - protein, 17 aa, Artificial sequence
  Linker_TAL4
SGGSGSVGRQPSGSGSG

SEQ ID NO: 376 - protein, 26 aa, Artificial sequence
  Linker_TAL5
SGGSGSYTRLPERSELPAEISGSGSG

SEQ ID NO: 377 - protein, 38 aa, Artificial sequence
  Linker_TAL6
SGGSGSIVVLNRAETPLPLDPTGKVKAELDTRSGSGSG

SEQ ID NO: 378 - protein, 21 aa, Artificial sequence
  Linker_TAL7
SGGSGSTATPPGSVTSGSGSG

SEQ ID NO: 379 - protein, 21 aa, Artificial sequence
  Linker_TAL8
SGGSGSLDNFINRPVSGSGSG

SEQ ID NO: 380 - protein, 21 aa, Artificial sequence
  Linker_TAL9
SGGSGSVSSAKTTAPSGSGSG

SEQ ID NO: 381 - protein, 22 aa, Artificial sequence
  Linker_TAL10
SGGSGSDSKAPNASNLSGSGSG

SEQ ID NO: 382 - protein, 23 aa, Artificial sequence
  Linker_TAL11
SGGSGSPVKMFDRHSSLSGSGSG

SEQ ID NO: 383 - protein, 23 aa, Artificial sequence
  Linker_TAL12
SGGSGSAPAETKAEPMTSGSGSG

SEQ ID NO: 384 - protein, 26 aa, Artificial sequence
  Linker_TAL13
SGGSGSVSTDSTPVTNQKSSSGSGSG

SEQ ID NO: 385 - protein, 16 aa, Artificial sequence
  Linker_TAL14
SGGSGSDSVISGSGSG

SEQ ID NO: 386 - protein, 33 aa, Artificial sequence
  Linker_TAL15
SGGSGSARFTLAVGDNRVLDMASTYFDSGSGSG

SEQ ID NO: 387 - protein, 17 aa, Artificial sequence
  Linker_TAL16
SGGSGSLQENLSGSGSG

SEQ ID NO: 388 - protein, 19 aa, Artificial sequence
  Linker_TAL17
SGGSGSGYTYINPSGSGSG

SEQ ID NO: 389 - protein, 26 aa, Artificial sequence
  Linker_TAL18
SGGSGSYKLPAVTTMKVRPASGSGSG

SEQ ID NO: 390 - protein, 16 aa, Artificial sequence
  Linker_TAL19
SGGSGSLEGSSGSGSG

SEQ ID NO: 391 - protein, 16 aa, Artificial sequence
  Linker_TAL20
SGGSGSIVEASGSGSG

SEQ ID NO: 392 - protein, 18 aa, Artificial sequence
  Linker_TAL21
SGGSGSQTYQPASGSGSG

SEQ ID NO: 393 - protein, 27 aa, Artificial sequence
  Linker_TAL22
SGGSGSIARTDLKKNRDYPLASGSGSG

SEQ ID NO: 394 - protein, 18 aa, Artificial sequence
  Linker_TAL23
SGGSGSLPEEKGSGSGSG

SEQ ID NO: 395 - protein, 16 aa, Artificial sequence
  Linker_TAL24
SGGSGSYTSTSGSGSG

SEQ ID NO: 396 - protein, 20 aa, Artificial sequence
  Linker_TAL25
SGGSGSSRPSESEGSGSGSG

SEQ ID NO: 397 - protein, 17 aa, Artificial sequence
  Linker_TAL26
SGGSGSLGNSLSGSGSG

SEQ ID NO: 398 - protein, 19 aa, Artificial sequence
  Linker_TAL27
SGGSGSLTKYKSSSGSGSG

SEQ ID NO: 399 - protein, 33 aa, Artificial sequence
  Linker_TAL28
SGGSGSTEEPGAPLTTPPTLHGNQARASGSGSG

SEQ ID NO: 400 - protein, 18 aa, Artificial sequence
  Linker_TAL29
SGGSGSFSHSTTSGSGSG

SEQ ID NO: 401 - protein, 20 aa, Artificial sequence
  Linker_TAL30
SGGSGSPELKQKSSSGSGSG

SEQ ID NO: 402 - protein, 40 aa, Artificial sequence
  Linker_TAL31
SGGSGSILNKEKKAVSPLLLTTTNSSEGLSMGNYSGSGSG

SEQ ID NO: 403 - protein, 31 aa, Artificial sequence
  Linker_TAL32
ELAEFHARYADLLLRDLRERPVSLVRGPDSG

SEQ ID NO: 404 - protein, 31 aa, Artificial sequence
  Linker_TAL33
ELAEFHARPDPLLLRDLRERPVSLVRGLGSG

SEQ ID NO: 405 - protein, 26 aa, Artificial sequence
  Linker_TAL34
ELAEFHARYADLLLRDLRERSGSGSG

SEQ ID NO: 406 - protein, 31 aa, Artificial sequence
  Linker_TAL35
DIFDYYAGVAEVMLGHIAGRPATRKRWPNSG

SEQ ID NO: 407 - protein, 31 aa, Artificial sequence
  Linker_TAL36
DIFDYYAGPDPVMLGHIAGRPATRKRWLGSG

SEQ ID NO: 408 - protein, 26 aa, Artificial sequence
  Linker_TAL37
DIFDYYAGVAEVMLGHIAGRSGSGSG

SEQ ID NO: 409 - protein, 37 aa, Artificial sequence
  Linker A
SIVAQLSRPDPALVSFQKLKLACLGGRPALDAVKKGL

SEQ ID NO: 410 - protein, 37 aa, Artificial sequence
  Linker B
SIVAQLSRPDPAAVSAQKAKAACLGGRPALDAVKKGL

SEQ ID NO: 411 - protein, 37 aa, Artificial sequence
  Linker C
SIVAQLSRPDPAVVTFHKLKLACLGGRPALDAVKKGL

SEQ ID NO: 412 - protein, 44 aa, Artificial sequence
  Linker D
SIVAQLSRPDPAQSLAQELSLNESQIKIACLGGRPALDAVKKGL

SEQ ID NO: 413 - protein, 40 aa, Artificial sequence
  Linker E
SIVAQLSRPDPALQLPPLERLTLDACLGGRPALDAVKKGL

SEQ ID NO: 414 - protein, 38 aa, Artificial sequence
  Linker F
SIVAQLSRPDPAIHKKFSSIQMACLGGRPALDAVKKGL

SEQ ID NO: 415 - protein, 40 aa, Artificial sequence
  Linker G
SIVAQLSRPDPAAAAATNDHAVAAACLGGRPALDAVKKGL

SEQ ID NO: 416 - protein, 1044 aa, Artificial sequence
  Linker385_ColE7
MADPIRSRTPSPARELLPGPQPDGVQPTADRGVSPPAGGPLDGLPARRTMSRTRLPSPPAPSPAFSAGSFSDLLRQFDPSLFNTSLFDSLPPFGAHHTEAATGEWDEVQSGLRAADAPPPTMRVAVTAARPPRAKPAPRRRAAQPSDASPAAQVDLRTLGYSQQQQEKIKPKVRSTVAQHHEALVGHGFTHAHIVALSQHPAALGTVAVKYQDMIAALPEATHEAIVGVGKQWSGARALEALLTVAGELRGPPLQLDTGQLLKIAKRGGVTAVEAVHAWRNALTGAPLNLTPEQVVAIASHDGGKQALETVQRLLPVLCQAHGLTPQQVVAIASNGGGKQALETVQRLLPVLCQAHGLTPEQVVAIASNIGGKQALETVQALLPVLCQAHGLTPQQVVAIASNGGGKQALETVQRLLPVLCQAHGLTPEQVVAIASNIGGKQALETVQALLPVLCQAHGLTPEQVVAIASNIGGKQALETVQALLPVLCQAHGLTPEQVVAIASNIGGKQALETVQALLPVLCQAHGLTPEQVVAIASHDGGKQALETVQRLLPVLCQAHGLTPEQVVAIASHDGGKQALETVQRLLPVLCQAHGLTPQQVVAIASNGGGKQALETVQRLLPVLCQAHGLTPEQVVAIASNIGGKQALETVQALLPVLCQAHGLTPEQVVAIASNIGGKQALETVQALLPVLCQAHGLTPEQVVAIASHDGGKQALETVQRLLPVLCQAHGLTPEQVVAIASHDGGKQALETVQRLLPVLCQAHGLTPEQVVAIASHDGGKQALETVQRLLPVLCQAHGLTPQQVVAIASNGGGKQALETVQRLLPVLCQAHGLTPEQVVAIASHDGGKQALETVQRLLPVLCQAHGLTPQQVVAIASNGGGRPALESGGSGSDSVISGSGSGDPSGGSGSKRNKPGKATGKGKPVNNKWLNNAGKDLGSPVPDRIANKLRDKEFKSFDDFRKKFWEEVSKDPELSKQFSRNNNDRMKVGKAPKTRTQDVSGKRTSFELHHEKPISQNGGVYDMDNISVVTPKRHIDIHRGKAA

SEQ ID NO: 417 - protein, 1047 aa, Artificial sequence
  Linker388_ColE7
MADPIRSRTPSPARELLPGPQPDGVQPTADRGVSPPAGGPLDGLPARRTMSRTRLPSPPAPSPAFSAGSFSDLLRQFDPSLFNTSLFDSLPPFGAHHTEAATGEWDEVQSGLRAADAPPPTMRVAVTAARPPRAKPAPRRRAAQPSDASPAAQVDLRTLGYSQQQQEKIKPKVRSTVAQHHEALVGHGFTHAHIVALSQHPAALGTVAVKYQDMIAALPEATHEAIVGVGKQWSGARALEALLTVAGELRGPPLQLDTGQLLKIAKRGGVTAVEAVHAWRNALTGAPLNLTPEQVVAIASHDGGKQALETVQRLLPVLCQAHGLTPQQVVAIASNGGGKQALETVQRLLPVLCQAHGLTPEQVVAIASNIGGKQALETVQALLPVLCQAHGLTPQQVVAIASNGGGKQALETVQRLLPVLCQAHGLTPEQVVAIASNIGGKQALETVQALLPVLCQAHGLTPEQVVAIASNIGGKQALETVQALLPVLCQAHGLTPEQVVAIASNIGGKQALETVQALLPVLCQAHGLTPEQVVAIASHDGGKQALETVQRLLPVLCQAHGLTPEQVVAIASHDGGKQALETVQRLLPVLCQAHGLTPQQVVAIASNGGGKQALETVQRLLPVLCQAHGLTPEQVVAIASNIGGKQALETVQALLPVLCQAHGLTPEQVVAIASNIGGKQALETVQALLPVLCQAHGLTPEQVVAIASHDGGKQALETVQRLLPVLCQAHGLTPEQVVAIASHDGGKQALETVQRLLPVLCQAHGLTPEQVVAIASHDGGKQALETVQRLLPVLCQAHGLTPQQVVAIASNGGGKQALETVQRLLPVLCQAHGLTPEQVVAIASHDGGKQALETVQRLLPVLCQAHGLTPQQVVAIASNGGGRPALESGGSGSGYTYINPSGSGSGDPSGGSGSKRNKPGKATGKGKPVNNKWLNNAGKDLGSPVPDRIANKLRDKEFKSFDDFRKKFWEEVSKDPELSKQFSRNNNDRMKVGKAPKTRTQDVSGKRTSFELHHEKPISQNGGVYDMDNISVVTPKRHIDIHRGKAA

SEQ ID NO: 418 - protein, 1046 aa, Artificial sequence
  Linker394_ColE7
MADPIRSRTPSPARELLPGPQPDGVQPTADRGVSPPAGGPLDGLPARRTMSRTRLPSPPAPSPAFSAGSFSDLLRQFDPSLFNTSLFDSLPPFGAHHTEAATGEWDEVQSGLRAADAPPPTMRVAVTAARPPRAKPAPRRRAAQPSDASPAAQVDLRTLGYSQQQQEKIKPKVRSTVAQHHEALVGHGFTHAHIVALSQHPAALGTVAVKYQDMIAALPEATHEAIVGVGKQWSGARALEALLTVAGELRGPPLQLDTGQLLKIAKRGGVTAVEAVHAWRNALTGAPLNLTPEQVVAIASHDGGKQALETVQRLLPVLCQAHGLTPQQVVAIASNGGGKQALETVQRLLPVLCQAHGLTPEQVVAIASNIGGKQALETVQALLPVLCQAHGLTPQQVVAIASNGGGKQALETVQRLLPVLCQAHGLTPEQVVAIASNIGGKQALETVQALLPVLCQAHGLTPEQVVAIASNIGGKQALETVQALLPVLCQAHGLTPEQVVAIASNIGGKQALETVQALLPVLCQAHGLTPEQVVAIASHDGGKQALETVQRLLPVLCQAHGLTPEQVVAIASHDGGKQALETVQRLLPVLCQAHGLTPQQVVAIASNGGGKQALETVQRLLPVLCQAHGLTPEQVVAIASNIGGKQALETVQALLPVLCQAHGLTPEQVVAIASNIGGKQALETVQALLPVLCQAHGLTPEQVVAIASHDGGKQALETVQRLLPVLCQAHGLTPEQVVAIASHDGGKQALETVQRLLPVLCQAHGLTPEQVVAIASHDGGKQALETVQRLLPVLCQAHGLTPQQVVAIASNGGGKQALETVQRLLPVLCQAHGLTPEQVVAIASHDGGKQALETVQRLLPVLCQAHGLTPQQVVAIASNGGGRPALESGGSGSLPEEKGSGSGSGDPSGGSGSKRNKPGKATGKGKPVNNKWLNNAGKDLGSPVPDRIANKLRDKEFKSFDDFRKKFWEEVSKDPELSKQFSRNNNDRMKVGKAPKTRTQDVSGKRTSFELHHEKPISQNGGVYDMDNISVVTPKRHIDIHRGKAA

SEQ ID NO: 419 - protein, 1046 aa, Artificial sequence
  Linker400_ColE7
MADPIRSRTPSPARELLPGPQPDGVQPTADRGVSPPAGGPLDGLPARRTMSRTRLPSPPAPSPAFSAGSFSDLLRQFDPSLFNTSLFDSLPPFGAHHTEAATGEWDEVQSGLRAADAPPPTMRVAVTAARPPRAKPAPRRRAAQPSDASPAAQVDLRTLGYSQQQQEKIKPKVRSTVAQHHEALVGHGFTHAHIVALSQHPAALGTVAVKYQDMIAALPEATHEAIVGVGKQWSGARALEALLTVAGELRGPPLQLDTGQLLKIAKRGGVTAVEAVHAWRNALTGAPLNLTPEQVVAIASHDGGKQALETVQRLLPVLCQAHGLTPQQVVAIASNGGGKQALETVQRLLPVLCQAHGLTPEQVVAIASNIGGKQALETVQALLPVLCQAHGLTPQQVVAIASNGGGKQALETVQRLLPVLCQAHGLTPEQVVAIASNIGGKQALETVQALLPVLCQAHGLTPEQVVAIASNIGGKQALETVQALLPVLCQAHGLTPEQVVAIASNIGGKQALETVQALLPVLCQAHGLTPEQVVAIASHDGGKQALETVQRLLPVLCQAHGLTPEQVVAIASHDGGKQALETVQRLLPVLCQAHGLTPQQVVAIASNGGGKQALETVQRLLPVLCQAHGLTPEQVVAIASNIGGKQALETVQALLPVLCQAHGLTPEQVVAIASNIGGKQALETVQALLPVLCQAHGLTPEQVVAIASHDGGKQALETVQRLLPVLCQAHGLTPEQVVAIASHDGGKQALETVQRLLPVLCQAHGLTPEQVVAIASHDGGKQALETVQRLLPVLCQAHGLTPQQVVAIASNGGGKQALETVQRLLPVLCQAHGLTPEQVVAIASHDGGKQALETVQRLLPVLCQAHGLTPQQVVAIASNGGGRPALESGGSGSFSHSTTSGSGSGDPSGGSGSKRNKPGKATGKGKPVNNKWLNNAGKDLGSPVPDRIANKLRDKEFKSFDDFRKKFWEEVSKDPELSKQFSRNNNDRMKVGKAPKTRTQDVSGKRTSFELHHEKPISQNGGVYDMDNISVVTPKRHIDIHRGKAA

SEQ ID NO: 420 - protein, 365 aa, Artificial sequence
  cT11_TevD01
MVDLRTLGYSQQQQEKIKPKVRSTVAQHHEALVGHGFTHAHIVALSQHPAALGTVAVKYQDMIAALPEATHEAIVGVGKQWSGARALEALLTVAGELRGPPLQLDTGQLLKIAKRGGVTAVEAVHAWRNALTGAPLNLTGDARGIRSRASRSIVAQLSRPDPGSKSGIYQIKNTLNNKVYVGSAKDFEKRWKRHFKDLEKGCHSSIKLQRSFNKHGNVFECSILEEIPYEKDLIIERENFWIKELNSKINGYNIADATFGDTCSTHPLKEEIIKKRSETVKAKMLKLGPDGRKALYSKPGSKNGRWNPETHKFCKCGVRIQTSAYTCSKCRNRSGENNSFFNHKHSDITKSKISGKMKGQGPSAD

SEQ ID NO: 421 - protein, 352 aa, Artificial sequence
  cT11_TevD02
MVDLRTLGYSQQQQEKIKPKVRSTVAQHHEALVGHGFTHAHIVALSQHPAALGTVAVKYQDMIAALPEATHEAIVGVGKQWSGARALEALLTVAGELRGPPLQLDTGQLLKIAKRGGVTAVEAVHAWRNALTGAPLNLTGDARGIRSRASRSIVAQLSRPDPGSKSGIYQIKNTLNNKVYVGSAKDFEKRWKRHFKDLEKGCHSSIKLQRSFNKHGNVFECSILEEIPYEKDLIIERENFWIKELNSKINGYNIADATFGDTCSTHPLKEEIIKKRSETVKAKMLKLGPDGRKALYSKPGSKNGRWNPETHKFCKCGVRIQTSAYTCSKCRNRSGENNSFFNHKHSQGPSAD

SEQ ID NO: 422 - protein, 292 aa, Artificial sequence
  cT11_TevD05
MVDLRTLGYSQQQQEKIKPKVRSTVAQHHEALVGHGFTHAHIVALSQHPAALGTVAVKYQDMIAALPEATHEAIVGVGKQWSGARALEALLTVAGELRGPPLQLDTGQLLKIAKRGGVTAVEAVHAWRNALTGAPLNLTGDARGIRSRASRSIVAQLSRPDPGSKSGIYQIKNTLNNKVYVGSAKDFEKRWKRHFKDLEKGCHSSIKLQRSFNKHGNVFECSILEEIPYEKDLIIERENFWIKELNSKINGYNIADATFGDTCSTHPLKEEIIKKRSETVKAKMLKQGPSAD

SEQ ID NO: 423 - protein, 949 aa, Artificial sequence
  cT11Avr_TevD01
MVDLRTLGYSQQQQEKIKPKVRSTVAQHHEALVGHGFTHAHIVALSQHPAALGTVAVKYQDMIAALPEATHEAIVGVGKQWSGARALEALLTVAGELRGPPLQLDTGQLLKIAKRGGVTAVEAVHAWRNALTGAPLNLTPEQVVAIASHDGGKQALETVQRLLPVLCQAHGLTPQQVVAIASNGGGKQALETVQRLLPVLCQAHGLTPEQVVAIASNIGGKQALETVQALLPVLCQAHGLTPQQVVAIASNGGGKQALETVQRLLPVLCQAHGLTPEQVVAIASNIGGKQALETVQALLPVLCQAHGLTPEQVVAIASNIGGKQALETVQALLPVLCQAHGLTPEQVVAIASNIGGKQALETVQALLPVLCQAHGLTPEQVVAIASHDGGKQALETVQRLLPVLCQAHGLTPEQVVAIASHDGGKQALETVQRLLPVLCQAHGLTPQQVVAIASNGGGKQALETVQRLLPVLCQAHGLTPEQVVAIASNIGGKQALETVQALLPVLCQAHGLTPEQVVAIASNIGGKQALETVQALLPVLCQAHGLTPEQVVAIASHDGGKQALETVQRLLPVLCQAHGLTPEQVVAIASHDGGKQALETVQRLLPVLCQAHGLTPEQVVAIASHDGGKQALETVQRLLPVLCQAHGLTPQQVVAIASNGGGKQALETVQRLLPVLCQAHGLTPEQVVAIASHDGGKQALETVQRLLPVLCQAHGLTPQQVVAIASNGGGRPALESIVAQLSRPDPGSKSGIYQIKNTLNNKVYVGSAKDFEKRWKRHFKDLEKGCHSSIKLQRSFNKHGNVFECSILEEIPYEKDLIIERENFWIKELNSKINGYNIADATFGDTCSTHPLKEEIIKKRSETVKAKMLKLGPDGRKALYSKPGSKNGRWNPETHKFCKCGVRIQTSAYTCSKCRNRSGENNSFFNHKHSDITKSKISGKMKGQGPSAD

SEQ ID NO: 424 - protein, 936 aa, Artificial sequence
  cT11Avr_TevD02
MVDLRTLGYSQQQQEKIKPKVRSTVAQHHEALVGHGFTHAHIVALSQHPAALGTVAVKYQDMIAALPEATHEAIVGVGKQWSGARALEALLTVAGELRGPPLQLDTGQLLKIAKRGGVTAVEAVHAWRNALTGAPLNLTPEQVVAIASHDGGKQALETVQRLLPVLCQAHGLTPQQVVAIASNGGGKQALETVQRLLPVLCQAHGLTPEQVVAIASNIGGKQALETVQALLPVLCQAHGLTPQQVVAIASNGGGKQALETVQRLLPVLCQAHGLTPEQVVAIASNIGGKQALETVQALLPVLCQAHGLTPEQVVAIASNIGGKQALETVQALLPVLCQAHGLTPEQVVAIASNIGGKQALETVQALLPVLCQAHGLTPEQVVAIASHDGGKQALETVQRLLPVLCQAHGLTPEQVVAIASHDGGKQALETVQRLLPVLCQAHGLTPQQVVAIASNGGGKQALETVQRLLPVLCQAHGLTPEQVVAIASNIGGKQALETVQALLPVLCQAHGLTPEQVVAIASNIGGKQALETVQALLPVLCQAHGLTPEQVVAIASHDGGKQALETVQRLLPVLCQAHGLTPEQVVAIASHDGGKQALETVQRLLPVLCQAHGLTPEQVVAIASHDGGKQALETVQRLLPVLCQAHGLTPQQVVAIASNGGGKQALETVQRLLPVLCQAHGLTPEQVVAIASHDGGKQALETVQRLLPVLCQAHGLTPQQVVAIASNGGGRPALESIVAQLSRPDPGSKSGIYQIKNTLNNKVYVGSAKDFEKRWKRHFKDLEKGCHSSIKLQRSFNKHGNVFECSILEEIPYEKDLIIERENFWIKELNSKINGYNIADATFGDTCSTHPLKEEIIKKRSETVKAKMLKLGPDGRKALYSKPGSKNGRWNPETHKFCKCGVRIQTSAYTCSKCRNRSGENNSFFNHKHSQGPSAD

SEQ ID NO: 425 - protein, 876 aa, Artificial sequence
  cT11Avr_TevD05
MVDLRTLGYSQQQQEKIKPKVRSTVAQHHEALVGHGFTHAHIVALSQHPAALGTVAVKYQDMIAALPEATHEAIVGVGKQWSGARALEALLTVAGELRGPPLQLDTGQLLKIAKRGGVTAVEAVHAWRNALTGAPLNLTPEQVVAIASHDGGKQALETVQRLLPVLCQAHGLTPQQVVAIASNGGGKQALETVQRLLPVLCQAHGLTPEQVVAIASNIGGKQALETVQALLPVLCQAHGLTPQQVVAIASNGGGKQALETVQRLLPVLCQAHGLTPEQVVAIASNIGGKQALETVQALLPVLCQAHGLTPEQVVAIASNIGGKQALETVQALLPVLCQAHGLTPEQVVAIASNIGGKQALETVQALLPVLCQAHGLTPEQVVAIASHDGGKQALETVQRLLPVLCQAHGLTPEQVVAIASHDGGKQALETVQRLLPVLCQAHGLTPQQVVAIASNGGGKQALETVQRLLPVLCQAHGLTPEQVVAIASNIGGKQALETVQALLPVLCQAHGLTPEQVVAIASNIGGKQALETVQALLPVLCQAHGLTPEQVVAIASHDGGKQALETVQRLLPVLCQAHGLTPEQVVAIASHDGGKQALETVQRLLPVLCQAHGLTPEQVVAIASHDGGKQALETVQRLLPVLCQAHGLTPQQVVAIASNGGGKQALETVQRLLPVLCQAHGLTPEQVVAIASHDGGKQALETVQRLLPVLCQAHGLTPQQVVAIASNGGGRPALESIVAQLSRPDPGSKSGIYQIKNTLNNKVYVGSAKDFEKRWKRHFKDLEKGCHSSIKLQRSFNKHGNVFECSILEEIPYEKDLIIERENFWIKELNSKINGYNIADATFGDTCSTHPLKEEIIKKRSETVKAKMLKQGPSAD

SEQ ID NO: 426 - protein, 368 aa, Artificial sequence
  TevW01_cT11
MAKSGIYQIKNTLNNKVYVGSAKDFEKRWKRHFKDLEKGCHSSIKLQRSFNKHGNVFECSILEEIPYEKDLIIERENFWIKELNSKINGYNIADATFGDTCSTHPLKEEIIKKRSETVKAKMLKLGPDGRKALYSKPGSKNGRWNPETHKFCKCGVRIQTSAYTCSKCRNRSGENNSFFNHKHSDITKSKISGKMKGKKPSNSGVDLRTLGYSQQQQEKIKPKVRSTVAQHHEALVGHGFTHAHIVALSQHPAALGTVAVKYQDMIAALPEATHEAIVGVGKQWSGARALEALLTVAGELRGPPLQLDTGQLLKIAKRGGVTAVEAVHAWRNALTGAPLNLTGDARGIRSRASRSIVAQLSRPDPSAD

SEQ ID NO: 427 - protein, 366 aa, Artificial sequence
  TevD01_cT11
MAKSGIYQIKNTLNNKVYVGSAKDFEKRWKRHFKDLEKGCHSSIKLQRSFNKHGNVFECSILEEIPYEKDLIIERENFWIKELNSKINGYNIADATFGDTCSTHPLKEEIIKKRSETVKAKMLKLGPDGRKALYSKPGSKNGRWNPETHKFCKCGVRIQTSAYTCSKCRNRSGENNSFFNHKHSDITKSKISGKMKGQGPSGVDLRTLGYSQQQQEKIKPKVRSTVAQHHEALVGHGFTHAHIVALSQHPAALGTVAVKYQDMIAALPEATHEAIVGVGKQWSGARALEALLTVAGELRGPPLQLDTGQLLKIAKRGGVTAVEAVHAWRNALTGAPLNLTGDARGIRSRASRSIVAQLSRPDPSAD

SEQ ID NO: 428 - protein, 353 aa, Artificial sequence
  TevD02_cT11
MAKSGIYQIKNTLNNKVYVGSAKDFEKRWKRHFKDLEKGCHSSIKLQRSFNKHGNVFECSILEEIPYEKDLIIERENFWIKELNSKINGYNIADATFGDTCSTHPLKEEIIKKRSETVKAKMLKLGPDGRKALYSKPGSKNGRWNPETHKFCKCGVRIQTSAYTCSKCRNRSGENNSFFNHKHSQGPSGVDLRTLGYSQQQQEKIKPKVRSTVAQHHEALVGHGFTHAHIVALSQHPAALGTVAVKYQDMIAALPEATHEAIVGVGKQWSGARALEALLTVAGELRGPPLQLDTGQLLKIAKRGGVTAVEAVHAWRNALTGAPLNLTGDARGIRSRASRSIVAQLSRPDPSAD

SEQ ID NO: 429 - protein, 293 aa, Artificial sequence
  TevD05_cT11
MAKSGIYQIKNTLNNKVYVGSAKDFEKRWKRHFKDLEKGCHSSIKLQRSFNKHGNVFECSILEEIPYEKDLIIERENFWIKELNSKINGYNIADATFGDTCSTHPLKEEIIKKRSETVKAKMLKQGPSGVDLRTLGYSQQQQEKIKPKVRSTVAQHHEALVGHGFTHAHIVALSQHPAALGTVAVKYQDMIAALPEATHEAIVGVGKQWSGARALEALLTVAGELRGPPLQLDTGQLLKIAKRGGVTAVEAVHAWRNALTGAPLNLTGDARGIRSRASRSIVAQLSRPDPSAD

SEQ ID NO: 430 - protein, 952 aa, Artificial sequence
  TevW01_cT11Avr
MAKSGIYQIKNTLNNKVYVGSAKDFEKRWKRHFKDLEKGCHSSIKLQRSFNKHGNVFECSILEEIPYEKDLIIERENFWIKELNSKINGYNIADATFGDTCSTHPLKEEIIKKRSETVKAKMLKLGPDGRKALYSKPGSKNGRWNPETHKFCKCGVRIQTSAYTCSKCRNRSGENNSFFNHKHSDITKSKISGKMKGKKPSNSGVDLRTLGYSQQQQEKIKPKVRSTVAQHHEALVGHGFTHAHIVALSQHPAALGTVAVKYQDMIAALPEATHEAIVGVGKQWSGARALEALLTVAGELRGPPLQLDTGQLLKIAKRGGVTAVEAVHAWRNALTGAPLNLTPEQVVAIASHDGGKQALETVQRLLPVLCQAHGLTPQQVVAIASNGGGKQALETVQRLLPVLCQAHGLTPEQVVAIASNIGGKQALETVQALLPVLCQAHGLTPQQVVAIASNGGGKQALETVQRLLPVLCQAHGLTPEQVVAIASNIGGKQALETVQALLPVLCQAHGLTPEQVVAIASNIGGKQALETVQALLPVLCQAHGLTPEQVVAIASNIGGKQALETVQALLPVLCQAHGLTPEQVVAIASHDGGKQALETVQRLLPVLCQAHGLTPEQVVAIASHDGGKQALETVQRLLPVLCQAHGLTPQQVVAIASNGGGKQALETVQRLLPVLCQAHGLTPEQVVAIASNIGGKQALETVQALLPVLCQAHGLTPEQVVAIASNIGGKQALETVQALLPVLCQAHGLTPEQVVAIASHDGGKQALETVQRLLPVLCQAHGLTPEQVVAIASHDGGKQALETVQRLLPVLCQAHGLTPEQVVAIASHDGGKQALETVQRLLPVLCQAHGLTPQQVVAIASNGGGKQALETVQRLLPVLCQAHGLTPEQVVAIASHDGGKQALETVQRLLPVLCQAHGLTPQQVVAIASNGGGRPALESIVAQLSRPDPSAD

SEQ ID NO: 431 - protein, 950 aa, Artificial sequence
  TevD01_cT11Avr
MAKSGIYQIKNTLNNKVYVGSAKDFEKRWKRHFKDLEKGCHSSIKLQRSFNKHGNVFECSILEEIPYEKDLIIERENFWIKELNSKINGYNIADATFGDTCSTHPLKEEIIKKRSETVKAKMLKLGPDGRKALYSKPGSKNGRWNPETHKFCKCGVRIQTSAYTCSKCRNRSGENNSFFNHKHSDITKSKISGKMKGQGPSGVDLRTLGYSQQQQEKIKPKVRSTVAQHHEALVGHGFTHAHIVALSQHPAALGTVAVKYQDMIAALPEATHEAIVGVGKQWSGARALEALLTVAGELRGPPLQLDTGQLLKIAKRGGVTAVEAVHAWRNALTGAPLNLTPEQVVAIASHDGGKQALETVQRLLPVLCQAHGLTPQQVVAIASNGGGKQALETVQRLLPVLCQAHGLTPEQVVAIASNIGGKQALETVQALLPVLCQAHGLTPQQVVAIASNGGGKQALETVQRLLPVLCQAHGLTPEQVVAIASNIGGKQALETVQALLPVLCQAHGLTPEQVVAIASNIGGKQALETVQALLPVLCQAHGLTPEQVVAIASNIGGKQALETVQALLPVLCQAHGLTPEQVVAIASHDGGKQALETVQRLLPVLCQAHGLTPEQVVAIASHDGGKQALETVQRLLPVLCQAHGLTPQQVVAIASNGGGKQALETVQRLLPVLCQAHGLTPEQVVAIASNIGGKQALETVQALLPVLCQAHGLTPEQVVAIASNIGGKQALETVQALLPVLCQAHGLTPEQVVAIASHDGGKQALETVQRLLPVLCQAHGLTPEQVVAIASHDGGKQALETVQRLLPVLCQAHGLTPEQVVAIASHDGGKQALETVQRLLPVLCQAHGLTPQQVVAIASNGGGKQALETVQRLLPVLCQAHGLTPEQVVAIASHDGGKQALETVQRLLPVLCQAHGLTPQQVVAIASNGGGRPALESIVAQLSRPDPSAD

SEQ ID NO: 432 - protein, 937 aa, Artificial sequence
  TevD02_cT11Avr
MAKSGIYQIKNTLNNKVYVGSAKDFEKRWKRHFKDLEKGCHSSIKLQRSFNKHGNVFECSILEEIPYEKDLIIERENFWIKELNSKINGYNIADATFGDTCSTHPLKEEIIKKRSETVKAKMLKLGPDGRKALYSKPGSKNGRWNPETHKFCKCGVRIQTSAYTCSKCRNRSGENNSFFNHKHSQGPSGVDLRTLGYSQQQQEKIKPKVRSTVAQHHEALVGHGFTHAHIVALSQHPAALGTVAVKYQDMIAALPEATHEAIVGVGKQWSGARALEALLTVAGELRGPPLQLDTGQLLKIAKRGGVTAVEAVHAWRNALTGAPLNLTPEQVVAIASHDGGKQALETVQRLLPVLCQAHGLTPQQVVAIASNGGGKQALETVQRLLPVLCQAHGLTPEQVVAIASNIGGKQALETVQALLPVLCQAHGLTPQQVVAIASNGGGKQALETVQRLLPVLCQAHGLTPEQVVAIASNIGGKQALETVQALLPVLCQAHGLTPEQVVAIASNIGGKQALETVQALLPVLCQAHGLTPEQVVAIASNIGGKQALETVQALLPVLCQAHGLTPEQVVAIASHDGGKQALETVQRLLPVLCQAHGLTPEQVVAIASHDGGKQALETVQRLLPVLCQAHGLTPQQVVAIASNGGGKQALETVQRLLPVLCQAHGLTPEQVVAIASNIGGKQALETVQALLPVLCQAHGLTPEQVVAIASNIGGKQALETVQALLPVLCQAHGLTPEQVVAIASHDGGKQALETVQRLLPVLCQAHGLTPEQVVAIASHDGGKQALETVQRLLPVLCQAHGLTPEQVVAIASHDGGKQALETVQRLLPVLCQAHGLTPQQVVAIASNGGGKQALETVQRLLPVLCQAHGLTPEQVVAIASHDGGKQALETVQRLLPVLCQAHGLTPQQVVAIASNGGGRPALESIVAQLSRPDPSAD

SEQ ID NO: 433 - protein, 417 aa, Artificial sequence; identical to SEQ ID NO: 221
  cT11_NucA

SEQ ID NO: 434 - protein, 1001 aa, Artificial sequence; identical to SEQ ID NO: 222
  cT11Avr_NucA

SEQ ID NO: 435 - protein, 303 aa, Artificial sequence; identical to SEQ ID NO: 231
  cT11_ColE7

SEQ ID NO: 436 - protein, 887 aa, Artificial sequence; identical to SEQ ID NO: 232
  cT11Avr_ColE7

SEQ ID NO: 437 - protein, 819 aa, Artificial sequence
  cT11NptIIT5-L_ColE7_A497_CFS1
MVDLRTLGYSQQQQEKIKPKVRSTVAQHHEALVGHGFTHAHIVALSQHPAALGTVAVKYQDMIAALPEATHEAIVGVGKQWSGARALEALLTVAGELRGPPLQLDTGQLLKIAKRGGVTAVEAVHAWRNALTGAPLNLTPEQVVAIASHDGGKQALETVQRLLPVLCQAHGLTPEQVVAIASHDGGKQALETVQRLLPVLCQAHGLTPQQVVAIASNGGGKQALETVQRLLPVLCQAHGLTPQQVVAIASNGGGKQALETVQRLLPVLCQAHGLTPQQVVAIASNNGGKQALETVQRLLPVLCQAHGLTPEQVVAIASHDGGKQALETVQRLLPVLCQAHGLTPQQVVAIASNNGGKQALETVQRLLPVLCQAHGLTPEQVVAIASHDGGKQALETVQRLLPVLCQAHGLTPEQVVAIASNIGGKQALETVQALLPVLCQAHGLTPQQVVAIASNNGGKQALETVQRLLPVLCQAHGLTPEQVVAIASHDGGKQALETVQRLLPVLCQAHGLTPQQVVAIASNGGGKQALETVQRLLPVLCQAHGLTPQQVVAIASNNGGKQALETVQRLLPVLCQAHGLTPQQVVAIASNGGGKQALETVQRLLPVLCQAHGLTPQQVVAIASNNGGKQALETVQRLLPVLCQAHGLTPQQVVAIASNGGGRPALESIVAQLSRPDPGSSGSKRNKPGKATGKGKPVNNKWLNNAGKDLGSPVPDRIANKLRDKEFKSFDDFRAKFWEEVSKDPELSKQFSRNNNDRMKVGKAPKTRTQDVSGKRTSFELHHEKPISQNGGVYDMDNISVVTPKRHIDIHRGKGSTGD

SEQ ID NO: 438 - protein, 819 aa, Artificial sequence
  cT11NptIIT6-L_ColE7_A497_CFS1
MVDLRTLGYSQQQQEKIKPKVRSTVAQHHEALVGHGFTHAHIVALSQHPAALGTVAVKYQDMIAALPEATHEAIVGVGKQWSGARALEALLTVAGELRGPPLQLDTGQLLKIAKRGGVTAVEAVHAWRNALTGAPLNLTPQQVVAIASNNGGKQALETVQRLLPVLCQAHGLTPEQVVAIASNIGGKQALETVQALLPVLCQAHGLTPEQVVAIASNIGGKQALETVQALLPVLCQAHGLTPQQVVAIASNNGGKQALETVQRLLPVLCQAHGLTPEQVVAIASHDGGKQALETVQRLLPVLCQAHGLTPQQVVAIASNNGGKQALETVQRLLPVLCQAHGLTPQQVVAIASNNGGKQALETVQRLLPVLCQAHGLTPQQVVAIASNNGGKQALETVQRLLPVLCQAHGLTPEQVVAIASNIGGKQALETVQALLPVLCQAHGLTPEQVVAIASNIGGKQALETVQALLPVLCQAHGLTPQQVVAIASNNGGKQALETVQRLLPVLCQAHGLTPQQVVAIASNNGGKQALETVQRLLPVLCQAHGLTPQQVVAIASNNGGKQALETVQRLLPVLCQAHGLTPEQVVAIASNIGGKQALETVQALLPVLCQAHGLTPEQVVAIASHDGGKQALETVQRLLPVLCQAHGLTPQQVVAIASNGGGRPALESIVAQLSRPDPGSSGSKRNKPGKATGKGKPVNNKWLNNAGKDLGSPVPDRIANKLRDKEFKSFDDFRAKFWEEVSKDPELSKQFSRNNNDRMKVGKAPKTRTQDVSGKRTSFELHHEKPISQNGGVYDMDNISVVTPKRHIDIHRGKGSTGD

SEQ ID NO: 439 - protein, 529 aa, Artificial sequence
  cT11_scTB2aD01
MVDLRTLGYSQQQQEKIKPKVRSTVAQHHEALVGHGFTHAHIVALSQHPAALGTVAVKYQDMIAALPEATHEAIVGVGKQWSGARALEALLTVAGELRGPPLQLDTGQLLKIAKRGGVTAVEAVHAWRNALTGAPLNLTGDARGIRSRASRSIVAQLSRPDPGSDITKSKISEKMKGQGPSGNTKYNEEFLLYLAGFVDGDGSIVAQIKPHQSCKFKHQLRLTFNVTQKTQRRWFLDKLVDEIGVGHVYDSGSVSYYQLSEIKPLHNFLTQLQPFLELKQKQANLVLKIIEQLPSAKESPDKFLEVCTWVDQVAALNDSKTRKTTSETVRAVLDSLSEKKKSSPAAGDSSVSNSEHIAPLSLPSSPPSVGSNKKFLLYLAGFVDSDGSIIAQIKPNQSYKFKHYLSLTFCVTQKTQRRWFLDKLVDRIGVGYVQDRGSVSDYRLSEIKPLRNFLTQLQPFLKLKQKQANLVLKIIEQLPSAKESPDKFLEVCTWVDQVAALNDSKTRKTTSETVRAVLDSLSEKKKSSP

SEQ ID NO: 440 - protein, 529 aa, Artificial sequence
  cT11_scTB2aD01_148C
MVDLRTLGYSQQQQEKIKPKVRSTVAQHHEALVGHGFTHAHIVALSQHPAALGTVAVKYQDMIAALPEATHEAIVGVGKQWSGARALEALLTVAGELRGPPLQLDTGQLLKIAKRGGVTAVEAVHAWRNALTGAPLNLTGDARGIRSRASRSIVAQLSRPDPGSDITKSKISEKMKGQGPSGNTKYNEEFLLYLAGFVDGDGSIVAQIKPHQSCKFKHQLRLTFNVTQKTQRRWFLDKLVDEIGVGHVYDSGSVSYYQLSEIKPLHNFLTQLQPFLELKQKQANLVLKIIEQLPSAKESPDKFLEVCTWVDQVAALNDSKTRKTTSETCRAVLDSLSEKKKSSPAAGDSSVSNSEHIAPLSLPSSPPSVGSNKKFLLYLAGFVDSDGSIIAQIKPNQSYKFKHYLSLTFCVTQKTQRRWFLDKLVDRIGVGYVQDRGSVSDYRLSEIKPLRNFLTQLQPFLKLKQKQANLVLKIIEQLPSAKESPDKFLEVCTWVDQVAALNDSKTRKTTSETVRAVLDSLSEKKKSSP

SEQ ID NO: 441 - protein, 529 aa, Artificial sequence
  cT11_scTB2aD01_333C
MVDLRTLGYSQQQQEKIKPKVRSTVAQHHEALVGHGFTHAHIVALSQHPAALGTVAVKYQDMIAALPEATHEAIVGVGKQWSGARALEALLTVAGELRGPPLQLDTGQLLKIAKRGGVTAVEAVHAWRNALTGAPLNLTGDARGIRSRASRSIVAQLSRPDPGSDITKSKISEKMKGQGPSGNTKYNEEFLLYLAGFVDGDGSIVAQIKPHQSCKFKHQLRLTFNVTQKTQRRWFLDKLVDEIGVGHVYDSGSVSYYQLSEIKPLHNFLTQLQPFLELKQKQANLVLKIIEQLPSAKESPDKFLEVCTWVDQVAALNDSKTRKTTSETVRAVLDSLSEKKKSSPAAGDSSVSNSEHIAPLSLPSSPPSVGSNKKFLLYLAGFVDSDGSIIAQIKPNQSYKFKHYLSLTFCVTQKTQRRWFLDKLVDRIGVGYVQDRGSVSDYRLSEIKPLRNFLTQLQPFLKLKQKQANLVLKIIEQLPSAKESPDKFLEVCTWVDQVAALNDSKTRKTTSETCRAVLDSLSEKKKSSP

SEQ ID NO: 442 - protein, 349 aa, Artificial sequence; identical to SEQ ID NO: 293
  TCRB02-A-V148C

SEQ ID NO: 443 - protein, 349 aa, Artificial sequence; identical to SEQ ID NO: 294
  TCRB02-A-V333C

SEQ ID NO: 444 - protein, 977 aa, Artificial sequence
  cT11TB2A1_scTB2aD01
MVDLRTLGYSQQQQEKIKPKVRSTVAQHHEALVGHGFTHAHIVALSQHPAALGTVAVKYQDMIAALPEATHEAIVGVGKQWSGARALEALLTVAGELRGPPLQLDTGQLLKIAKRGGVTAVEAVHAWRNALTGAPLNLTPQQVVAIASNNGGKQALETVQRLLPVLCQAHGLTPEQVVAIASHDGGKQALETVQRLLPVLCQAHGLTPQQVVAIASNGGGKQALETVQRLLPVLCQAHGLTPQQVVAIASNNGGKQALETVQRLLPVLCQAHGLTPQQVVAIASNNGGKQALETVQRLLPVLCQAHGLTPQQVVAIASNGGGKQALETVQRLLPVLCQAHGLTPEQVVAIASHDGGKQALETVQRLLPVLCQAHGLTPEQVVAIASNIGGKQALETVQALLPVLCQAHGLTPQQVVAIASNNGGKQALETVQRLLPVLCQAHGLTPEQVVAIASHDGGKQALETVQRLLPVLCQAHGLTPQQVVAIASNNGGKQALETVQRLLPVLCQAHGLTPEQVVAIASHDGGKQALETVQRLLPVLCQAHGLTPEQVVAIASHDGGKQALETVQRLLPVLCQAHGLTPQQVVAIASNGGGRPALESIVAQLSRPDPGSDITKSKISEKMKGQGPSGNTKYNEEFLLYLAGFVDGDGSIVAQIKPHQSCKFKHQLRLTFNVTQKTQRRWFLDKLVDEIGVGHVYDSGSVSYYQLSEIKPLHNFLTQLQPFLELKQKQANLVLKIIEQLPSAKESPDKFLEVCTWVDQVAALNDSKTRKTTSETVRAVLDSLSEKKKSSPAAGDSSVSNSEHIAPLSLPSSPPSVGSNKKFLLYLAGFVDSDGSIIAQIKPNQSYKFKHYLSLTFCVTQKTQRRWFLDKLVDRIGVGYVQDRGSVSDYRLSEIKPLRNFLTQLQPFLKLKQKQANLVLKIIEQLPSAKESPDKFLEVCTWVDQVAALNDSKTRKTTSETVRAVLDSLSEKKKSSP

SEQ ID NO: 445 - protein, 977 aa, Artificial sequence
  cT11TB2A2_scTB2aD01
MVDLRTLGYSQQQQEKIKPKVRSTVAQHHEALVGHGFTHAHIVALSQHPAALGTVAVKYQDMIAALPEATHEAIVGVGKQWSGARALEALLTVAGELRGPPLQLDTGQLLKIAKRGGVTAVEAVHAWRNALTGAPLNLTPQQVVAIASNNGGKQALETVQRLLPVLCQAHGLTPEQVVAIASHDGGKQALETVQRLLPVLCQAHGLTPQQVVAIASNGGGKQALETVQRLLPVLCQAHGLTPQQVVAIASNNGGKQALETVQRLLPVLCQAHGLTPQQVVAIASNGGGKQALETVQRLLPVLCQAHGLTPQQVVAIASNNGGKQALETVQRLLPVLCQAHGLTPEQVVAIASHDGGKQALETVQRLLPVLCQAHGLTPQQVVAIASNGGGKQALETVQRLLPVLCQAHGLTPQQVVAIASNNGGKQALETVQRLLPVLCQAHGLTPQQVVAIASNNGGKQALETVQRLLPVLCQAHGLTPQQVVAIASNGGGKQALETVQRLLPVLCQAHGLTPEQVVAIASHDGGKQALETVQRLLPVLCQAHGLTPEQVVAIASNIGGKQALETVQALLPVLCQAHGLTPQQVVAIASNGGGRPALESIVAQLSRPDPGSDITKSKISEKMKGQGPSGNTKYNEEFLLYLAGFVDGDGSIVAQIKPHQSCKFKHQLRLTFNVTQKTQRRWFLDKLVDEIGVGHVYDSGSVSYYQLSEIKPLHNFLTQLQPFLELKQKQANLVLKIIEQLPSAKESPDKFLEVCTWVDQVAALNDSKTRKTTSETVRAVLDSLSEKKKSSPAAGDSSVSNSEHIAPLSLPSSPPSVGSNKKFLLYLAGFVDSDGSIIAQIKPNQSYKFKHYLSLTFCVTQKTQRRWFLDKLVDRIGVGYVQDRGSVSDYRLSEIKPLRNFLTQLQPFLKLKQKQANLVLKIIEQLPSAKESPDKFLEVCTWVDQVAALNDSKTRKTTSETVRAVLDSLSEKKKSSP

SEQ ID NO: 446 - protein, 977 aa, Artificial sequence
  cT11TB2A3_scTB2aD01
MVDLRTLGYSQQQQEKIKPKVRSTVAQHHEALVGHGFTHAHIVALSQHPAALGTVAVKYQDMIAALPEATHEAIVGVGKQWSGARALEALLTVAGELRGPPLQLDTGQLLKIAKRGGVTAVEAVHAWRNALTGAPLNLTPQQVVAIASNNGGKQALETVQRLLPVLCQAHGLTPQQVVAIASNGGGKQALETVQRLLPVLCQAHGLTPEQVVAIASNIGGKQALETVQALLPVLCQAHGLTPQQVVAIASNGGGKQALETVQRLLPVLCQAHGLTPQQVVAIASNNGGKQALETVQRLLPVLCQAHGLTPEQVVAIASHDGGKQALETVQRLLPVLCQAHGLTPQQVVAIASNGGGKQALETVQRLLPVLCQAHGLTPQQVVAIASNNGGKQALETVQRLLPVLCQAHGLTPQQVVAIASNGGGKQALETVQRLLPVLCQAHGLTPQQVVAIASNNGGKQALETVQRLLPVLCQAHGLTPEQVVAIASHDGGKQALETVQRLLPVLCQAHGLTPQQVVAIASNGGGKQALETVQRLLPVLCQAHGLTPQQVVAIASNNGGKQALETVQRLLPVLCQAHGLTPQQVVAIASNGGGRPALESIVAQLSRPDPGSDITKSKISEKMKGQGPSGNTKYNEEFLLYLAGFVDGDGSIVAQIKPHQSCKFKHQLRLTFNVTQKTQRRWFLDKLVDEIGVGHVYDSGSVSYYQLSEIKPLHNFLTQLQPFLELKQKQANLVLKIIEQLPSAKESPDKFLEVCTWVDQVAALNDSKTRKTTSETVRAVLDSLSEKKKSSPAAGDSSVSNSEHIAPLSLPSSPPSVGSNKKFLLYLAGFVDSDGSIIAQIKPNQSYKFKHYLSLTFCVTQKTQRRWFLDKLVDRIGVGYVQDRGSVSDYRLSEIKPLRNFLTQLQPFLKLKQKQANLVLKIIEQLPSAKESPDKFLEVCTWVDQVAALNDSKTRKTTSETVRAVLDSLSEKKKSSP

SEQ ID NO: 447 - protein, 1146 aa, Artificial sequence
  TevD02_cT11Avr_FokI-L
MAKSGIYQIKNTLNNKVYVGSAKDFEKRWKRHFKDLEKGCHSSIKLQRSFNKHGNVFECSILEEIPYEKDLIIERENFWIKELNSKINGYNIADATFGDTCSTHPLKEEIIKKRSETVKAKMLKLGPDGRKALYSKPGSKNGRWNPETHKFCKCGVRIQTSAYTCSKCRNRSGENNSFFNHKHSQGPSGVDLRTLGYSQQQQEKIKPKVRSTVAQHHEALVGHGFTHAHIVALSQHPAALGTVAVKYQDMIAALPEATHEAIVGVGKQWSGARALEALLTVAGELRGPPLQLDTGQLLKIAKRGGVTAVEAVHAWRNALTGAPLNLTPEQVVAIASHDGGKQALETVQRLLPVLCQAHGLTPQQVVAIASNGGGKQALETVQRLLPVLCQAHGLTPEQVVAIASNIGGKQALETVQALLPVLCQAHGLTPQQVVAIASNGGGKQALETVQRLLPVLCQAHGLTPEQVVAIASNIGGKQALETVQALLPVLCQAHGLTPEQVVAIASNIGGKQALETVQALLPVLCQAHGLTPEQVVAIASNIGGKQALETVQALLPVLCQAHGLTPEQVVAIASHDGGKQALETVQRLLPVLCQAHGLTPEQVVAIASHDGGKQALETVQRLLPVLCQAHGLTPQQVVAIASNGGGKQALETVQRLLPVLCQAHGLTPEQVVAIASNIGGKQALETVQALLPVLCQAHGLTPEQVVAIASNIGGKQALETVQALLPVLCQAHGLTPEQVVAIASHDGGKQALETVQRLLPVLCQAHGLTPEQVVAIASHDGGKQALETVQRLLPVLCQAHGLTPEQVVAIASHDGGKQALETVQRLLPVLCQAHGLTPQQVVAIASNGGGKQALETVQRLLPVLCQAHGLTPEQVVAIASHDGGKQALETVQRLLPVLCQAHGLTPQQVVAIASNGGGRPALESIVAQLSRPDPGSSGPNRGVTKQLVKSELEEKKSELRHKLKYVPHEYIELIEIARNSTQDRILEMKVMEFFMKVYGYRGKHLGGSRKPDGAIYTVGSPIDYGVIVDTKAYSGGYNLPIGQADEMQRYVEENQTRNKHINPNEWWKVYPSSVTEFKFLFVSGHFKGNYKAQLTRLNHITNCNGAVLSVEELLIGGEMIKAGTLTLEEVRRKFNNGEINFGSSAD

SEQ ID NO: 448 - protein, 1124 aa, Artificial sequence
  TevD02_cT11Avr_TevD02
MAKSGIYQIKNTLNNKVYVGSAKDFEKRWKRHFKDLEKGCHSSIKLQRSFNKHGNVFECSILEEIPYEKDLIIERENFWIKELNSKINGYNIADATFGDTCSTHPLKEEIIKKRSETVKAKMLKLGPDGRKALYSKPGSKNGRWNPETHKFCKCGVRIQTSAYTCSKCRNRSGENNSFFNHKHSQGPSGVDLRTLGYSQQQQEKIKPKVRSTVAQHHEALVGHGFTHAHIVALSQHPAALGTVAVKYQDMIAALPEATHEAIVGVGKQWSGARALEALLTVAGELRGPPLQLDTGQLLKIAKRGGVTAVEAVHAWRNALTGAPLNLTPEQVVAIASHDGGKQALETVQRLLPVLCQAHGLTPQQVVAIASNGGGKQALETVQRLLPVLCQAHGLTPEQVVAIASNIGGKQALETVQALLPVLCQAHGLTPQQVVAIASNGGGKQALETVQRLLPVLCQAHGLTPEQVVAIASNIGGKQALETVQALLPVLCQAHGLTPEQVVAIASNIGGKQALETVQALLPVLCQAHGLTPEQVVAIASNIGGKQALETVQALLPVLCQAHGLTPEQVVAIASHDGGKQALETVQRLLPVLCQAHGLTPEQVVAIASHDGGKQALETVQRLLPVLCQAHGLTPQQVVAIASNGGGKQALETVQRLLPVLCQAHGLTPEQVVAIASNIGGKQALETVQALLPVLCQAHGLTPEQVVAIASNIGGKQALETVQALLPVLCQAHGLTPEQVVAIASHDGGKQALETVQRLLPVLCQAHGLTPEQVVAIASHDGGKQALETVQRLLPVLCQAHGLTPEQVVAIASHDGGKQALETVQRLLPVLCQAHGLTPQQVVAIASNGGGKQALETVQRLLPVLCQAHGLTPEQVVAIASHDGGKQALETVQRLLPVLCQAHGLTPQQVVAIASNGGGRPALESIVAQLSRPDPGSKSGIYQIKNTLNNKVYVGSAKDFEKRWKRHFKDLEKGCHSSIKLQRSFNKHGNVFECSILEEIPYEKDLIIERENFWIKELNSKINGYNIADATFGDTCSTHPLKEEIIKKRSETVKAKMLKLGPDGRKALYSKPGSKNGRWNPETHKFCKCGVRIQTSAYTCSKCRNRSGENNSFFNHKHSQGPSAD

SEQ ID NO: 449 - protein, 1146 aa, Artificial sequence; identical to SEQ ID NO: 447
  TevD02_cT11Avr_FokI-L

SEQ ID NO: 450 - protein, 1124 aa, Artificial sequence; identical to SEQ ID NO: 448
  TevD02_cT11Avr_TevD02

SEQ ID NO: 451 - protein, 659 aa, Artificial sequence
  scTrex2_cT11
MGSEAPRAETFVFLDLEATGLPSVEPEIAELSLFAVHRSSLENPEHDESGALVLPRVLDKLTLCMCPERPFTAKASEITGLSSEGLARCRKAGFDGAVVRTLQAFLSRQAGPICLVAHNGFDYDFPLLCAELRRLGARLPRDTVCLDTLPALRGLDRAHSHGTRARGRQGYSLGSLFHRYFRAEPSAAHSAEGDVHTLLLIFLHRAAELLAWADEQARGWAHIEPMYLPPDDPSLEATPPQTGLDVPYSEAPRAETFVFLDLEATGLPSVEPEIAELSLFAVHRSSLENPEHDESGALVLPRVLDKLTLCMCPERPFTAKASEITGLSSEGLARCRKAGFDGAVVRTLQAFLSRQAGPICLVAHNGFDYDFPLLCAELRRLGARLPRDTVCLDTLPALRGLDRAHSHGTRARGRQGYSLGSLFHRYFRAEPSAAHSAEGDVHTLLLIFLHRAAELLAWADEQARGWAHIEPMYLPPDDPSLEAGGGGSGGGGSSGVDLRTLGYSQQQQEKIKPKVRSTVAQHHEALVGHGFTHAHIVALSQHPAALGTVAVKYQDMIAALPEATHEAIVGVGKQWSGARALEALLTVAGELRGPPLQLDTGQLLKIAKRGGVTAVEAVHAWRNALTGAPLNLTGDARGIRSRASRSIVAQLSRPDPSAD

SEQ ID NO: 452 - protein, 1452 aa, Artificial sequence [sequence omitted]

SEQ ID NO: 453 - protein, 1570 aa, Artificial sequence
  cT11Avr_ColE7_A497_cT11RagT2-R
MVDLRTLGYSQQQQEKIKPKVRSTVAQHHEALVGHGFTHAHIVALSQHPAALGTVAVKYQDMIAALPEATHEAIVGVGKQWSGARALEALLTVAGELRGPPLQLDTGQLLKIAKRGGVTAVEAVHAWRNALTGAPLNLTPEQVVAIASHDGGKQALETVQRLLPVLCQAHGLTPQQVVAIASNGGGKQALETVQRLLPVLCQAHGLTPEQVVAIASNIGGKQALETVQALLPVLCQAHGLTPQQVVAIASNGGGKQALETVQRLLPVLCQAHGLTPEQVVAIASNIGGKQALETVQALLPVLCQAHGLTPEQVVAIASNIGGKQALETVQALLPVLCQAHGLTPEQVVAIASNIGGKQALETVQALLPVLCQAHGLTPEQVVAIASHDGGKQALETVQRLLPVLCQAHGLTPEQVVAIASHDGGKQALETVQRLLPVLCQAHGLTPQQVVAIASNGGGKQALETVQRLLPVLCQAHGLTPEQVVAIASNIGGKQALETVQALLPVLCQAHGLTPEQVVAIASNIGGKQALETVQALLPVLCQAHGLTPEQVVAIASHDGGKQALETVQRLLPVLCQAHGLTPEQVVAIASHDGGKQALETVQRLLPVLCQAHGLTPEQVVAIASHDGGKQALETVQRLLPVLCQAHGLTPQQVVAIASNGGGKQALETVQRLLPVLCQAHGLTPEQVVAIASHDGGKQALETVQRLLPVLCQAHGLTPQQVVAIASNGGGRPALESIVAQLSRPDPGSSGSKRNKPGKATGKGKPVNNKWLNNAGKDLGSPVPDRIANKLRDKEFKSFDDFRAKFWEEVSKDPELSKQFSRNNNDRMKVGKAPKTRTQDVSGKRTSFELHHEKPISQNGGVYDMDNISVVTPKRHIDIHRGKGSTGGSSGVDLRTLGYSQQQQEKIKPKVRSTVAQHHEALVGHGFTHAHIVALSQHPAALGTVAVKYQDMIAALPEATHEAIVGVGKQWSGARALEALLTVAGELRGPPLQLDTGQLLKIAKRGGVTAVEAVHAWRNALTGAPLNLTPQQVVAIASNNGGKQALETVQRLLPVLCQAHGLTPQQVVAIASNGGGKQALETVQRLLPVLCQAHGLTPQQVVAIASNGGGKQALETVQRLLPVLCQAHGLTPQQVVAIASNGGGKQALETVQRLLPVLCQAHGLTPEQVVAIASNIGGKQALETVQALLPVLCQAHGLTPQQVVAIASNGGGKQALETVQRLLPVLCQAHGLTPQQVVAIASNNGGKQALETVQRLLPVLCQAHGLTPQQVVAIASNNGGKQALETVQRLLPVLCQAHGLTPQQVVAIASNGGGKQALETVQRLLPVLCQAHGLTPQQVVAIASNGGGKQALETVQRLLPVLCQAHGLTPEQVVAIASNIGGKQALETVQALLPVLCQAHGLTPEQVVAIASHDGGKQALETVQRLLPVLCQAHGLTPQQVVAIASNGGGKQALETVQRLLPVLCQAHGLTPQQVVAIASNGGGKQALETVQRLLPVLCQAHGLTPEQVVAIASNIGGKQALETVQALLPVLCQAHGLTPQQVVAIASNGGGRPALESIVAQLSRPDPSAD

SEQ ID NO: 454 - protein, 1570 aa, Artificial sequence
  cT11RagT2-R_ColE7_A497_cT11Avr
MVDLRTLGYSQQQQEKIKPKVRSTVAQHHEALVGHGFTHAHIVALSQHPAALGTVAVKYQDMIAALPEATHEAIVGVGKQWSGARALEALLTVAGELRGPPLQLDTGQLLKIAKRGGVTAVEAVHAWRNALTGAPLNLTPQQVVAIASNNGGKQALETVQRLLPVLCQAHGLTPQQVVAIASNGGGKQALETVQRLLPVLCQAHGLTPQQVVAIASNGGGKQALETVQRLLPVLCQAHGLTPQQVVAIASNGGGKQALETVQRLLPVLCQAHGLTPEQVVAIASNIGGKQALETVQALLPVLCQAHGLTPQQVVAIASNGGGKQALETVQRLLPVLCQAHGLTPQQVVAIASNNGGKQALETVQRLLPVLCQAHGLTPQQVVAIASNNGGKQALETVQRLLPVLCQAHGLTPQQVVAIASNGGGKQALETVQRLLPVLCQAHGLTPQQVVAIASNGGGKQALETVQRLLPVLCQAHGLTPEQVVAIASNIGGKQALETVQALLPVLCQAHGLTPEQVVAIASHDGGKQALETVQRLLPVLCQAHGLTPQQVVAIASNGGGKQALETVQRLLPVLCQAHGLTPQQVVAIASNGGGKQALETVQRLLPVLCQAHGLTPEQVVAIASNIGGKQALETVQALLPVLCQAHGLTPQQVVAIASNGGGRPALESIVAQLSRPDPGSSGSKRNKPGKATGKGKPVNNKWLNNAGKDLGSPVPDRIANKLRDKEFKSFDDFRAKFWEEVSKDPELSKQFSRNNNDRMKVGKAPKTRTQDVSGKRTSFELHHEKPISQNGGVYDMDNISVVTPKRHIDIHRGKGSTGGSSGVDLRTLGYSQQQQEKIKPKVRSTVAQHHEALVGHGFTHAHIVALSQHPAALGTVAVKYQDMIAALPEATHEAIVGVGKQWSGARALEALLTVAGELRGPPLQLDTGQLLKIAKRGGVTAVEAVHAWRNALTGAPLNLTPEQVVAIASHDGGKQALETVQRLLPVLCQAHGLTPQQVVAIASNGGGKQALETVQRLLPVLCQAHGLTPEQVVAIASNIGGKQALETVQALLPVLCQAHGLTPQQVVAIASNGGGKQALETVQRLLPVLCQAHGLTPEQVVAIASNIGGKQALETVQALLPVLCQAHGLTPEQVVAIASNIGGKQALETVQALLPVLCQAHGLTPEQVVAIASNIGGKQALETVQALLPVLCQAHGLTPEQVVAIASHDGGKQALETVQRLLPVLCQAHGLTPEQVVAIASHDGGKQALETVQRLLPVLCQAHGLTPQQVVAIASNGGGKQALETVQRLLPVLCQAHGLTPEQVVAIASNIGGKQALETVQALLPVLCQAHGLTPEQVVAIASNIGGKQALETVQALLPVLCQAHGLTPEQVVAIASHDGGKQALETVQRLLPVLCQAHGLTPEQVVAIASHDGGKQALETVQRLLPVLCQAHGLTPEQVVAIASHDGGKQALETVQRLLPVLCQAHGLTPQQVVAIASNGGGKQALETVQRLLPVLCQAHGLTPEQVVAIASHDGGKQALETVQRLLPVLCQAHGLTPQQVVAIASNGGGRPALESIVAQLSRPDPSAD

SEQ ID NO: 455 - protein, 977 aa, Artificial sequence
  cT11TB2A2_scTB2aD01_148C
MVDLRTLGYSQQQQEKIKPKVRSTVAQHHEALVGHGFTHAHIVALSQHPAALGTVAVKYQDMIAALPEATHEAIVGVGKQWSGARALEALLTVAGELRGPPLQLDTGQLLKIAKRGGVTAVEAVHAWRNALTGAPLNLTPQQVVAIASNNGGKQALETVQRLLPVLCQAHGLTPEQVVAIASHDGGKQALETVQRLLPVLCQAHGLTPQQVVAIASNGGGKQALETVQRLLPVLCQAHGLTPQQVVAIASNNGGKQALETVQRLLPVLCQAHGLTPQQVVAIASNNGGKQALETVQRLLPVLCQAHGLTPQQVVAIASNGGGKQALETVQRLLPVLCQAHGLTPEQVVAIASHDGGKQALETVQRLLPVLCQAHGLTPEQVVAIASNIGGKQALETVQALLPVLCQAHGLTPQQVVAIASNNGGKQALETVQRLLPVLCQAHGLTPEQVVAIASHDGGKQALETVQRLLPVLCQAHGLTPQQVVAIASNNGGKQALETVQRLLPVLCQAHGLTPEQVVAIASHDGGKQALETVQRLLPVLCQAHGLTPEQVVAIASHDGGKQALETVQRLLPVLCQAHGLTPQQVVAIASNGGGRPALESIVAQLSRPDPGSDITKSKISEKMKGQGPSGNTKYNEEFLLYLAGFVDGDGSIVAQIKPHQSCKFKHQLRLTFNVTQKTQRRWFLDKLVDEIGVGHVYDSGSVSYYQLSEIKPLHNFLTQLQPFLELKQKQANLVLKIIEQLPSAKESPDKFLEVCTWVDQVAALNDSKTRKTTSETCRAVLDSLSEKKKSSPAAGDSSVSNSEHIAPLSLPSSPPSVGSNKKFLLYLAGFVDSDGSIIAQIKPNQSYKFKHYLSLTFCVTQKTQRRWFLDKLVDRIGVGYVQDRGSVSDYRLSEIKPLRNFLTQLQPFLKLKQKQANLVLKIIEQLPSAKESPDKFLEVCTWVDQVAALNDSKTRKTTSETVRAVLDSLSEKKKSSP

1) A method for targeting and processing a double-stranded DNA, comprising:
(a) selecting one DNA target sequence of interest on one strand of a double-stranded DNA;
(b) providing a unique compact TALEN monomer comprising:
(i) one core TALE scaffold comprising Repeat Variable Dipeptide regions (RVDs) having DNA binding specificity onto said DNA target sequence of interest;
(ii) at least one catalytic domain wherein said catalytic domain is capable of processing DNA a few base pairs away from said DNA target sequence of interest when fused to the C and/or N terminal of said core TALE scaffold from (i);
(iii) optionally one peptidic linker to fuse said catalytic domain from (ii) to said core TALE scaffold from (i) when needed;
wherein said compact TALEN monomer is assembled to bind and process said double stranded DNA without requiring dirnerization;
(c) contacting said double-stranded DNA with said unique monomer such that the double-stranded is processed a few base pairs away in 3′ and/or 5′ direction(s) from said one strand target sequence.

2) A method according to claim 1, wherein said catalytic domain has cleavage activity on said double-stranded DNA.

3) A method according to claim 1, wherein said catalytic domain is fused to the C-terminal domain of said core TALE scaffold.

4) A method according to claim 1, wherein said catalytic domain is fused to the N-terminal domain of said core TALE scaffold.

5) A method according to claim 1, wherein one catalytic domain is fused to the C-terminal domain and another catalytic domain is fused to the N-terminal domain of said core TALE scaffold.

6) A method according to claim 1, wherein said catalytic domain is selected from the group consisting of proteins listed in Table 2 or a functional mutant thereof.

7) A method according to claim 1, wherein said catalytic domain is I-TevI (SEQ ID NO: 20) or a functional mutant thereof.

8) A method according to claim 7, wherein I-TevI (SEQ ID NO: 20) or said functional mutant thereof is fused to the N-terminal domain of said core TALE scaffold.

9) A method according to claim 8, comprising a protein sequence having at least 80%, more preferably 90%, again more preferably 95% amino acid sequence identity with the protein sequences selected from the group of SEQ ID NO: 426-432.

10) A method according to claim 1, wherein said catalytic domain is ColE7 (SEQ ID NO: 11) or a functional mutant thereof.

11) A method according to claim 10, wherein ColE7 (SEQ ID NO: 11) or said functional mutant thereof is fused to the C-terminus part of said core TALE scaffold.

12) A method according to claim 10, wherein ColE7 (SEQ ID NO: 11) or said functional mutant thereof is fused to the N-terminus part of said core TALE scaffold.

13) A method according to claim 11, comprising a protein sequence having at least 80%, more preferably 90%, again more preferably 95% amino acid sequence identity with the protein sequences selected from the group of SEQ ID NO: 435-438.

14) A method according to claim 1, wherein said catalytic domain is NucA (SEQ ID NO: 26) or a functional mutant thereof.

15) A method according to claim 14, wherein NucA (SEQ ID NO: 26) or said functional mutant thereof is fused to the C-terminus part of said core TALE scaffold.

16) A method according to claim 14, wherein NucA (SEQ ID NO: 26) or said functional mutant thereof is fused to the N-terminus part of said core TALE scaffold.

17) A method according to claim 15, comprising a protein sequence having at least 80%, more preferably 90%, again more preferably 95% amino acid sequence identity with the protein sequences selected from the group of SEQ ID NO: 433-434.

18) A method according to claim 1, wherein said catalytic domain is I-CreI (SEQ ID NO: 1) or a functional mutant thereof.

19) A method according to claim 18, wherein I-CreI (SEQ ID NO: 1) or said functional mutant thereof is fused to the C-terminus part of said core TALE scaffold.

20) A method according to claim 18, wherein I-CreI (SEQ ID NO: 1) or said functional mutant thereof is fused to the N-terminus part of said core TALE scaffold.

21) A method according to claim 19, comprising a protein sequence having at least 80%, more preferably 90%, again more preferably 95% amino acid sequence identity with the protein sequences selected from the group of SEQ ID NO: 439-441 and SEQ ID NO: 444-446.

22) A method according to claim 1, wherein said core TALE scaffold comprises a protein sequence having at least 80%, more preferably 90%, again more preferably 95% amino acid sequence identity with the protein sequences selected from the group consisting of SEQ ID NO: 134 and SEQ ID NO: 135.

23) A method according to claim 1, wherein said core TALE scaffold comprises a protein sequence having at least 80%, more preferably 90%, again more preferably 95% amino acid sequence identity with the protein sequences selected from the group consisting of SEQ ID NO: 136 to SEQ ID NO: 139.

24) A method according to claim 1, wherein said unique compact TALEN monomer further comprises:
(i) at least one enhancer domain;
(ii) Optionally one peptide linker to fuse said enhancer domain to one part of said unique compact TALEN monomer active entity.

25) A method according to claim 1, wherein said peptidic linker sequence can be selected from the group consisting of SEQ ID NO: 67-104 and SEQ ID NO: 372 to SEQ ID NO: 415.

26) A method according to claim 5, wherein said unique compact TALEN monomer comprises a combination of two catalytic domains respectively fused to the C-terminus part and to the N-terminus part of said core TALE scaffold selected from the group consisting of:
(i) A Nuc A domain (SEQ ID NO: 26) in N-terminus and a Nuc A domain (SEQ ID NO: 26) in C-terminus;
(ii) A ColE7 domain (SEQ ID NO: 11) in N-terminus and a ColE7 domain (SEQ ID NO: 11) in C-terminus;
(iii) A TevI domain (SEQ ID NO: 20) in N-terminus and a ColE7 domain (SEQ ID NO: 11) in C-terminus;
(iv) A TevI domain (SEQ ID NO: 20) in N-terminus and a NucA domain (SEQ ID NO: 26) in C-terminus;
(v) A ColE7 domain (SEQ ID NO: 11) in N-terminus and a NucA domain (SEQ ID NO: 26) in C-terminus;
(vi) A NucA domain (SEQ ID NO: 26) in N-terminus and a ColE7 domain (SEQ ID NO: 11) in C-terminus.

27) A method according to claim 29, comprising a protein sequence having at least 80%, more preferably 90%, again more preferably 95% amino acid sequence identity with the protein sequences selected from the group consisting of SEQ ID NO: 448 and 450.

28) A method according to claim 5, wherein said unique compact TALEN monomer comprises a combination of two catalytic domains respectively fused to the C-terminus part and to the N-terminus part of said core TALE scaffold selected from the group consisting of:
(i) A TevI domain (SEQ ID NO: 20) in N-terminus and a FokI domain (SEQ ID NO: 368) in C-terminus;
(ii) A TevI domain (SEQ ID NO: 20) in N-terminus and a TevI domain (SEQ ID NO: 20) in C-terminus;
(iii) A scTrex2 domain (SEQ ID NO: 451) in N-terminus and a FokI domain (SEQ ID NO: 368) in C-terminus.

29) A method according to claim 28, comprising a protein sequence having at least 80%, more preferably 90%, again more preferably 95% amino acid sequence identity with the protein sequences selected from the group consisting of SEQ ID NO: 447-450 and SEQ ID NO: 452.

30) A compact TALEN monomer comprising:
(i) one core TALE scaffold comprising Repeat Variable Dipeptide regions (RVDs) having DNA binding specificity onto a specific double-stranded DNA target sequence of interest;
(ii) at least one catalytic domain wherein said catalytic domain is capable of processing DNA a few base pairs away from said double-stranded DNA target sequence of interest when fused to the C or N terminal of said core TALE scaffold from (i);
(iii) optionally one peptidic linker to fuse said catalytic domain from (ii) to said engineered core TALE scaffold from (i) when needed;
wherein said compact TALEN monomer is assembled to bind said target DNA sequence and process double-stranded DNA without requiring dimerization.

31) A compact TALEN monomer according to claim 30, wherein said catalytic domain has cleavage activity on the double-stranded DNA.

32) A compact TALEN monomer according to claim 30, wherein said catalytic domain is fused to the C-terminal domain of said core TALE scaffold.

33) A compact TALEN monomer according to claim 30, wherein said catalytic domain is fused to the N-terminal domain of said core TALE scaffold.

34) A compact TALEN monomer according to claim 30, wherein one catalytic domain is fused to the C-terminal domain and another catalytic domain is fused to the N-terminal domain of said core TALE scaffold.

35) A compact TALEN monomer according to claim 30, wherein said catalytic domain is selected from the group consisting of proteins listed in Table 2 or a functional mutant thereof.

36) A compact TALEN monomer according to claim 30, wherein said catalytic domain is I-TevI (SEQ ID NO: 20) or a functional mutant thereof.

37) A compact TALEN monomer according to claim 36, wherein I-TevI (SEQ ID NO: 20) or said functional mutant thereof is fused to the N-terminal domain of said core TALE scaffold.

38) A compact TALEN monomer according to claim 37, comprising a protein sequence having at least 80%, more preferably 90%, again more preferably 95% amino acid sequence identity with the protein sequences selected from the group of SEQ ID NO: 426-432.

39) A compact TALEN monomer according to claim 30, wherein said catalytic domain is ColE7 (SEQ ID NO: 11) or a functional mutant thereof.

40) A compact TALEN monomer according to claim 39, wherein ColE7 (SEQ ID NO: 11) or said functional mutant thereof is fused to the C-terminus part of said core TALE scaffold.

41) A compact TALEN monomer according to claim 39, wherein ColE7 (SEQ ID NO: 11) or said functional mutant thereof is fused to the N-terminus part of said core TALE scaffold.

42) A compact TALEN monomer according to claim 40, comprising a protein sequence having at least 80%, more preferably 90%, again more preferably 95% amino acid sequence identity with the protein sequences selected from the group of SEQ ID NO:435-438.

43) A compact TALEN monomer according to claim 30, wherein said catalytic domain is NucA (SEQ ID NO: 26) or a functional mutant thereof.

44) A compact TALEN monomer according to claim 43, wherein NucA (SEQ ID NO: 26) or said functional mutant thereof is fused to the C-terminus part of said core TALE scaffold.

45) A compact TALEN monomer according to claim 43, wherein NucA (SEQ ID NO: 26) or said functional mutant thereof is fused to the N-terminus part of said core TALE scaffold.

46) A compact TALEN monomer according to claim 44, comprising a protein sequence having at least 80%, more preferably 90%, again more preferably 95% amino acid sequence identity with the protein sequences selected from the group of SEQ ID NO:433-434.

47) A compact TALEN monomer according to claim 30, wherein said catalytic domain is I-CreI (SEQ ID NO: 1) or a functional mutant thereof.

48) A compact TALEN monomer according to claim 47, wherein I-CreI (SEQ ID NO: 1) or said functional mutant thereof is fused to the C-terminus part of said core TALE scaffold.

49) A compact TALEN monomer according to claim 47, wherein I-CreI (SEQ ID NO: 1) or said functional mutant thereof is fused to the N-terminus part of said core TALE scaffold.

50) A compact TALEN monomer according to claim 48, comprising a protein sequence having at least 80%, more preferably 90%, again more preferably 95% amino acid sequence identity with the protein sequences selected from the group of SEQ ID NO: 444-446.

51) A compact TALEN monomer according to claim 30, wherein said core TALE scaffold comprises a protein sequence having at least 80%, more preferably 90%, again more preferably 95% amino acid sequence identity with the protein sequences selected from the group consisting of SEQ ID NO: 134 and SEQ ID NO: 135.

52) A compact TALEN monomer according to claim 30, wherein said core TALE scaffold comprises a protein sequence having at least 80%, more preferably 90%, again more preferably 95% amino acid sequence identity with the protein sequences selected from the group consisting of SEQ ID NO: 136 to SEQ ID NO: 139.

53) A compact TALEN monomer according to claim 30, wherein said unique compact TALEN monomer further comprises:
(i) At least one enhancer domain;
(ii) Optionally one peptide linker to fuse said enhancer domain to one part of said unique compact TALEN monomer active entity.

54) A compact TALEN monomer according to claim 30, wherein said peptidic linker sequence can be selected from the group consisting of SEQ ID NO: 67-104 and SEQ ID NO: 372 to SEQ ID NO: 415.

55) A compact TALEN monomer according to claim 34, comprising a combination of two catalytic domains respectively fused to the C-terminus part and to the N-terminus part of said core TALE scaffold selected from the group consisting of:
(i) A Nuc A domain (SEQ ID NO: 26) in N-terminus and a Nuc A domain (SEQ ID NO: 26) in C-terminus;
(ii) A ColE7 domain (SEQ ID NO: 11) in N-terminus and a ColE7 domain (SEQ ID NO: 11) in C-terminus;
(iii) A TevI domain (SEQ ID NO: 20) in N-terminus and a ColE7 domain (SEQ ID NO: 11) in C-terminus;
(iv) A TevI domain (SEQ ID NO: 20) in N-terminus and a NucA domain (SEQ ID NO: 26) in C-terminus;
(v) A ColE7 domain (SEQ ID NO: 11) in N-terminus and a NucA domain (SEQ ID NO: 26) in C-terminus;
(vi) A NucA domain (SEQ ID NO: 26) in N-terminus and a ColE7 domain (SEQ ID NO: 11) in C-terminus.

56) A compact TALEN monomer according to claim 55, comprising a protein sequence having at least 80%, more preferably 90%, again more preferably 95% amino acid sequence identity with the protein sequences selected from the group consisting of SEQ ID NO: 448 and 450.

57) A compact TALEN monomer according to claim 37, wherein said unique compact TALEN monomer comprises a combination of two catalytic domains respectively fused to the C-terminus part and to the N-terminus part of said core TALE scaffold selected from the group consisting of:
(i) A TevI domain (SEQ ID NO: 20) in N-terminus and a FokI domain (SEQ ID NO: 368) in C-terminus;
(ii) A TevI domain (SEQ ID NO: 20) in N-terminus and a TevI domain (SEQ ID NO: 20) in C-terminus;
(iii) A scTrex2 domain (SEQ ID NO: 451) in N-terminus and a FokI domain (SEQ ID NO: 368) in C-terminus.

58) A method according to claim 63, comprising a protein sequence having at least 80%, more preferably 90%, again more preferably 95% amino acid sequence identity with the protein sequences selected from the group consisting of SEQ ID NO: 447-450 and SEQ ID NO: 452.

59) A recombinant polynucleotide encoding a compact TALEN according to any one of claims 30 to 58.

60) A vector comprising a recombinant polynucleotide according to claim 59.

61) A composition comprising a compact TALEN according to claim 30 and a carrier.

62) A pharmaceutical composition comprising a compact TALEN according to claim 30 and a pharmaceutically active carrier.

63) A host cell which comprises a recombinant polynucleotide of claim 59.

64) A non-human transgenic animal which comprises a recombinant polynucleotide of claim 59.

65) A non-human transgenic animal which comprises a vector of claim 60.

66) A transgenic plant which comprises a recombinant polynucleotide of claim 59.

67) A transgenic plant which comprises a vector of claim 60.

68) A kit comprising a compact TALEN monomer according to claim 30 and instructions for use in enhancing DNA processing efficiency of a single double-stranded DNA target sequence of interest.

69) A method for increasing targeted Homologous Recombination comprising a compact TALEN monomer according to claim 30wherein at least one catalytic domain has a cleavase activity.

70) A method for increasing targeted Homologous Recombination with less Non Homologous End-joining comprising a compact TALEN monomer according to claim 30 wherein at least one catalytic domain has a nickase activity.

71) A method for increasing excision of a single-strand of DNA spanning the binding region of a compact TALEN monomer according to claim 30 wherein:
(i) at least one catalytic domain has a cleavase activity;
(ii) at least one catalytic domain has a nickase activity.

72) A method of treatment of a genetic disease caused by a mutation in a specific single double-stranded DNA target sequence in a gene comprising administering to a subject in need thereof an effective amount of a compact TALEN of claim 30 or a variant thereof.

73) A method for inserting a transgene into a specific single double-stranded DNA target sequence of a genomic locus of a cell, tissue or non-human animal wherein at least one compact TALEN monomer of claim 30 is introduced in said cell, tissue or non-human animal.

74) A method to modulate the activity of a compact TALEN monomer according to claim 30 when expressed in a cell wherein said method comprises the step of introducing in said cell an auxiliary domain modulating the activity of said compact TALEN.

75) A method according to claim 74 to inhibit the activity of a compact TALEN monomer comprising:
(iv) one core TALE scaffold comprising Repeat Variable Dipeptide regions (RVDs) having DNA binding specificity onto a specific double-stranded DNA target sequence of interest;
(v) at least one catalytic domain wherein said catalytic domain is capable of processing DNA a few base pairs away from said double-stranded DNA target sequence of interest when fused to the C or N terminal of said core TALE scaffold from (i);
(vi) optionally one peptidic linker to fuse said catalytic domain from (ii) to said engineered core TALE scaffold from (i) when needed;
wherein said compact TALEN monomer is assembled to bind said target DNA sequence and process double-stranded DNA without requiring dimerization

76) A method according to claim 74 wherein the catalytic domain of said compact TALEN monomer is NucA (SEQ ID NO: 26) and said auxiliary domain is NuiA (SEQ ID NO: 229) or a functional mutant thereof.

77) A method according to claim 74 wherein the catalytic domain of said compact TALEN monomer is ColE7 (SEQ ID NO: 11) and said auxiliary domain is Im7 (SEQ ID NO: 230) or a functional mutant thereof.
